(19) United States
(12) Patent Application Publication
(10) Pub. No.: US 2023/0242884 A1
(43) Pub. Date: Aug. 3, 2023

(54) COMPOSITIONS AND METHODS FOR ENGRAFTMENT OF BASE EDITED CELLS

(71) Applicant: Beam Therapeutics Inc., Cambridge, MA (US)

(72) Inventors: Sarah SMITH, Cambridge, MA (US); Dana LEVASSEUR, Cambridge, MA (US); Jonathan YEN, Cambridge, MA (US)

(73) Assignee: Beam Therapeutics Inc., Cambridge, MA (US)

(21) Appl. No.: 17/799,159

(22) PCT Filed: Feb. 12, 2021
(86) PCT No.: PCT/US2021/017989

§ 371 Date: Aug. 11, 2022

Related U.S. Application Data
(60) Provisional application No. 62/976,239, filed on Feb. 13, 2020.

(51) Int. Cl. C12N 5/0789; C12N 15/10; A61P 7/00; C12N 9/22; C12N 9/78; C07K 14/805

(52) U.S. Cl. CPC C12N 5/0647; C12N 15/102; A61P 7/00; C12N 9/22; C12N 9/78; C12Y 305/04004; C07K 14/805

(57) ABSTRACT

The invention provides compositions comprising novel adenosine base editors (e.g., ABE8) that have increased efficiency and methods of using these adenosine deaminase variants for editing a target sequence and methods of using same to treat genetical disorder or conditions, e.g. sickle cell disease, with engraftment.

### CROSS REFERENCE TO RELATED APPLICATION

[0001] This application claims priority to and benefit of provisional application Ser. No. 62/976,239, filed on Feb. 13, 2020, the entire contents of which are incorporated by reference herein in their entirety.

### SEQUENCE LISTING

[0002] This application contains a Sequence Listing which has been submitted electronically in ASCII format and is hereby incorporated by reference in its entirety. Said ASCII copy, created on Feb. 12, 2021, is named 180802-043701PCT_SL.txt and is 2,097,152 bytes in size.

### BACKGROUND

[0003] Targeted editing of nucleic acid sequences, for example, the targeted cleavage or the targeted modification of genomic DNA is a highly promising approach for the study of gene function and also has the potential to provide new therapies for human genetic diseases. Currently available base editors include cytidine base editors (e.g., BE4) that convert target C⋅G base pairs to T⋅A and adenine base editors (e.g., ABE7.10) that convert A⋅T to G⋅C. There is a need in the art for improved targeted editing of nucleic acids for use in treatment of specific diseases, such as for engraftment to treat a genetic disorder, for example, a genetic disorder leading to a hematopoietic diseases or disorders, such as Sickle Cell Disease (SCD). Current methods of treatment are focused on managing the symptoms of the disease. Methods for editing the genetic mutations that cause sickle cell disease (SCD) are urgently required.

### SUMMARY OF THE INVENTION

[0004] As described below, the present invention features compositions and methods involving the use of adenine base editors (ABEs), e.g. ABE8.8, that have increased efficiency and methods of using base editors comprising adenosine deaminase variants for editing a target sequence. As further described herein, such base editors, when introduced (e.g., by electroporation) into hematopoietic stem cells, hematopoietic progenitor cells and descendants thereof, provide viable and robust base-edited donor cells, which exhibit stem cell phenotype and activity, and which demonstrate successful engraftment into the bone marrow of animals in an in vivo mouse model. The base-edited (“edited”) cells described and used in the methods herein maintain a high level of base editing and function over a long term time period, e.g., for at least 8 weeks or for at least 16 weeks, post engraftment.

[0005] In an aspect, the invention features a method of engrafting; nucleobase-edited hematopoietic stem cells or progenitors thereof in a subject having a hemoglobinopathy. The method involves: (a) contacting hematopoietic stem cells or progenitors thereof in vitro with a guide RNA and a base editor containing a polynucleotide programmable DNA binding domain and a deaminase domain, or a polynucleotide encoding the base editor, where the guide RNA targets the polynucleotide programmable DNA binding domain to induce a nucleobase change in a target hemoglobin (HBB) gene or in the promoter region of HBG1/2, thereby obtaining nucleobase-edited hematopoietic stem cells or progenitors thereof; and where the nucleobase-edited hematopoietic stem cells or progenitors thereof are contacted with the gRNA and the base editor within 48 hours following collection from a donor; and (b) administering the nucleobase-edited hematopoietic stem cells or progenitors thereof to a subject in an effective amount to obtain engraftment of the nucleobase-edited hematopoietic stem cells or progenitors thereof in tissues of the subject after administration. In embodiments, the nucleobase-edited hematopoietic stem cells or progenitors thereof include CD34⁺ cells enriched from polymorphonuclear blood cells (PBMCs) collected from the donor.

[0006] In an aspect, the invention features a method of engrafting nucleobase-edited hematopoietic stem cells or progenitors thereof in a subject having a hemoglobinopathy. The method involves: (a) contacting hematopoietic stem cells or progenitors thereof in vitro with a guide RNA and a base editor containing a polynucleotide programmable DNA binding domain and a deaminase domain, or a polynucleotide encoding the base editor, where the guide RNA targets the polynucleotide programmable DNA binding domain to induce a nucleobase change in a target hemoglobin (HBB) gene or in the promoter region of HBG1/2, thereby obtaining nucleobase-edited hematopoietic stem cells or progenitors thereof; and (b) administering the nucleobase-edited hematopoietic stem cells or progenitors thereof to a subject in an effective amount to obtain engraftment of the nucleobase-edited hematopoietic stem cells or progenitors thereof in tissues of the subject after administration.

[0007] In an aspect, the invention features a method of treating a hemoglobinopathy in a subject. The method involves: (a) contacting hematopoietic stem cells or progenitors thereof in vitro with a guide RNA and a base editor containing a polynucleotide programmable DNA binding domain and a deaminase domain, or a polynucleotide encoding the base editor, where the guide RNA targets the polynucleotide programmable DNA binding domain to induce a nucleobase change in a target hemoglobin (HBB) gene or in a target hemoglobin (HBB) gene in the promoter region of HBG1/2, thereby obtaining nucleobase-edited hematopoietic stem cells or progenitors thereof; and (b) administering the nucleobase-edited hematopoietic stem cells or progenitors thereof to a subject in an effective amount to obtain engraftment of the nucleobase-edited hematopoietic stem cells or progenitors thereof in tissues of the subject after administration.

[0008] In an aspect, the invention features a method of engrafting nucleobase-edited hematopoietic stem cells or progenitors thereof in a subject having a hemoglobinopathy. The method involves: (a) contacting hematopoietic stem cells or progenitors thereof in vitro with a guide RNA and an adenosine base editor containing a polynucleotide programmable DNA binding domain and an adenosine deaminase domain containing an amino acid sequence with at least 85% sequence identity to the sequence MSEVEFSHEYWMRHALTLAKRARDEREVPVGAVLVLNNRVIGEGWNRAIGLHDPTAH AEIMALRQGGLVMQNYRLIDATLYVTFEPCVMCAGAMLHSRIGRVVFGVRNAKTGAAG SLMDVLHYPGMNHRVEITEGILADECAALLCYFFRMPRQVFNAQKKAQSSTD (SEQ ID NO: 3) and containing the alterations Y1231-1, Y147R, and Q154R, or a polynucleotide encoding the base editor, where the adenosine deaminase domain catalyzes the hydrolytic deamination of adenine or adenosine, and where the guide RNA targets the polynucleotide programmable DNA binding domain to induce an A to G nucleobase change in a target hemoglobin (HBB) gene or in the promoter region of HBG1/2, thereby obtaining nucleobase-edited hematopoietic stem cells or progenitors thereof; and (b) administering the nucleobase-edited hematopoietic stem cells or progenitors thereof to a subject in an effective amount to obtain engraftment of the nucleobase-edited hematopoietic stem cells or progenitors thereof in tissues of the subject after administration.

[0009] In an aspect, the invention features a method of treating a hemoglobinopathy in a subject. The method involves: (a) contacting hematopoietic stem cells or progenitors thereof in vitro with a guide RNA and an adenosine base editor containing a polynucleotide programmable DNA binding domain and an adenosine deaminase domain containing an amino acid sequence with at least 85% sequence identity to MSEVEFSHEYWMRHALTLAKRARDEREVPVGAVLVLNNRVIGEGWNRAIGLHDPTAH AEIMALRQGGLVMQNYRLIDATLYVTFEPCVMCAGAMLHSRIGRVVFGVRNAKTGAAG SLMDVLHYPGMNHRVEITEGILADECAALLCYFFRMPRQVFNAQKKAQSSTD (SEQ ID NO: 3) and containing the alterations Y123H, Y147R, and Q154R, or a polynucleotide encoding the base editor, where the adenosine deaminase domain catalyzes the hydrolytic deamination of adenine or adenosine, and where the guide RNA targets the polynucleotide programmable DNA binding domain to induce an A to G nucleobase change in a target hemoglobin (HBB) gene or in the promoter region of HBG1/2, thereby obtaining nucleobase-edited hematopoietic stem cells or progenitors thereof; and (b) administering the nucleobase-edited hematopoietic stem cells or progenitors thereof to a subject in an effective amount to obtain engraftment of the nucleobase-edited hematopoietic stem cells or progenitors thereof in tissues of the subject after administration.

[0010] In an aspect, the invention features a method of engrafting edited hematopoietic stem cells or progenitors thereof in a subject having a hemoglobinopathy. The method involves: (a) contacting hematopoietic stem cells or progenitors thereof in vitro with a guide RNA and a base editor containing an amino acid sequence with at least 80% sequence identity to one of the following two amino acid sequences: MSEVEFSHEYWMRHALTLAKRARDEREVPVGAVLVLNNRVIGEGWNRAIGLHDPTAH AEIMALRQGGLVMQNYRLIDATLYVTFEPCVMCAGAMIHSRIGRVVFGVRNAKTGAAG SLMDVLHHPGMNHRVEITEGILADECAALLCRFFRMPRRVFNAQKKAQSSTDSGGSSG GSSGSETPGTSESATPESSGGSSGGSDKKYSIGLAIGTNSVGWAVITDEYKVPSKKFKVL GNTDRHSIKKNLIGALLFDSGETAEATRLKRTARRRYTRRKNRICYLQEIFSNEMAKVD DSFFHRLEESFLVEEDKKHERHPIFGNIVDEVAYHEKYPTIYHLRKKLVDSTDKADLRLI YLALAHMIKFRGHFLIEGDLNPDNSDVDKLFIQLVQTYNQLFEENPINASGVDAKAILSA RLSKSRRLENLIAQLPGEKKNGLFGNLIALSLGLTPNFKSNFDLAEDAKLQLSKDTYDDD LDNLLAQIGDQYADLFLAAKNLSDAILLSDILRVNTEITKAPLSASMIKRYDEHHQDLTL LKALVRQQLPEKYKEIFFDQSKNGYAGYIDGGASQEEFYKFIKPILEKMDGTEELLVKLN REDLLRKQRTFDNGSIPHQIHLGELHAILRRQEDFYPFLKDNREKIEKILTFRIPYYVGPLA RGNSRFAWMTRKSEETITPWNFEEVVDKGASAQSFIERMTNFDKNLPNEKVLPKHSLLY EYFTVYNELTKVKYVTEGMRKPAFLSGEQKKAIVDLLFKTNRKVTVKQLKEDYFKKIE CFDSVEISGVEDRFNASLGTYHDLLKIIKDKDFLDNEENEDILEDIVLTLTLFEDREMIEER LKTYAHLFDDKVMKQLKRRRYTGWGRLSRKLINGIRDKQSGKTILDFLKSDGFANRNF MQLIHDDSLTFKEDIQKAQVSGQGDSLHEHIANLAGSPAIKKGILQTVKVVDELVKVMG RHKPENIVIEMARENQTTQKGQKNSRERMKRIEEGIKELGSQILKEHPVENTQLQNEKLY LYYLQNGRDMYVDQELDINRLSDYDVDHIVPQSFLKDDSIDNKVLTRSDKNRGKSDNV PSEEVVKKMKNYWRQLLNAKLITQRKFDNLTKAERGGLSELDKAGFIKRQLVETRQITK HVAQILDSRMNTKYDENDKLIREVKVITLKSKLVSDFRKDFQFYKVREINNYHHAHDA YLNAVVGTALIKKYPKLESEFVYGDYKVYDVRKMIAKSEQEIGKATAKYFFYSNIMNFF KTEITLANGEIRKRPLIETNGETGEIVWDKGRDFATVRKVLSMPQVNIVKKTEVQTGGFS KESILPKRNSDKLIARKKDWDPKKYGGFDSPTVAYSVLVVAKVEKGKSKKLKSVKELL GITIMERSSFEKNPIDFLEAKGYKEVKKDLIIKLPKYSLFELENGRKRMLASAGELQKGN ELALPSKYVNFLYLASHYEKLKGSPEDNEQKQLFVEQHKHYLDEIIEQISEFSKRVILAD ANLDKVLSAYNKHRDKPIREQAENIIHLFTLTNLGAPAAFKYFDTTIDRKRYTSTKEVLD ATLIHQSITGLYETRIDLSQLGGDEGADKRTADGSEFESPKKKRKV (SEQ ID NO: 258), and MSEVEFSHEYWMRHALTLAKRAWDEREVPVGAVLVHNNRVIGEGWNRPIGRHDPTAH AEIMALRQGGLVMQNYRLIDATLYVTLEPCVMCAGAMIHSRIGRVVFGARDAKTGAA GSLMDVLHHPGMNHRVEITEGILADECAALLSDFFRMRRQEIKAQKKAQSSTDSGGSSG GSSGSETPGTSESATPESSGGSSGGSSEVEFSHEYWMRHALTLAKRARDEREVPVGAVL VLNNRVIGEGWNRAIGLHDPTAHAEIMALRQGGLVMQNYRLIDATLYVTFEPCVMCAG AMIIHSRIGRVVFGVRNAKTGAAGSLMDVLHHPGMNHRVEITEGILADECAALLCRFFR MPRRVFNAQKKAQSSTDSGGSSGGSSGSETPGTSESATPESSGGSSGGSDKKYSIGLAIG TNSVGWAVITDEYKVPSKKFKVLGNTDRHSIKKNLIGALLFDSGETAEATRLKRTARRR YTRRKNRICYLQEIFSNEMAKVDDSFFHRLEESFLVEEDKKHERHPIFGNIVDEVAYHEK YPTIYHLRKKLVDSTDKADLRLIYLALAHMIKFRGHFLIEGDLNPDNSDVDKLFIQLVQT YNQLFEENPINASGVDAKAILSARLSKSRRLENLIAQLPGEKKNGLFGNLIALSLGLTPNF KSNFDLAEDAKLQLSKDTYDDDLDNLLAQIGDQYADLFLAAKNLSDAILLSDILRVNTEI TKAPLSASMIKRYDEHHQDLTLLKALVRQQLPEKYKEIFFDQSKNGYAGYIDGGASQEE FYKFIKPILEKMDGTEELLVKLNREDLLRKQRTFDNGSIPHQIHLGELHAILRRQEDFYPF LKDNREKIEKILTFRIPYYVGPLARGNSRFAWMTRKSEETITPWNFEEVVDKGASAQSFI ERMTNFDKNLPNEKVLPKHSLLYEYFTVYNELTKVKYVTEGMRKPAFLSGEQKKAIVD LLFKTNRKVTVKQLKEDYFKKIECFDSVEISGVEDRFNASLGTYHDLLKIIKDKDFLDNE ENEDILEDIVLTLTLFEDREMIEERLKTYAHLFDDKVMKQLKRRRYTGWGRLSRKLINGI RDKQSGKTILDFLKSDGFANRNFMQLIHDDSLTFKEDIQKAQVSGQGDSLHEHIANLAG SPAIKKGILQTVKVVDELVKVMGRHKPENIVIEMARENQTTQKGQKNSRERMKRIEEGI KELGSQILKEHPVENTQLQNEKLYLYYLQNGRDMYVDQELDINRLSDYDVDHIVPQSFL KDDSIDNKVLTRSDKNRGKSDNVPSEEVVKKMKNYWRQLLNAKLITQRKFDNLTKAE RGGLSELDKAGFIKRQLVETRQITKHVAQILDSRMNTKYDENDKLIREVKVITLKSKLVS DFRKDFQFYKVREINNYHHAHDAYLNAVVGTALIKKYPKLESEFVYGDYKVYDVRKMI AKSEQEIGKATAKYFFYSNIMNFFKTEITLANGEIRKRPLIETNGETGEIVWDKGRDFATV RKVLSMPQVNIVKKTEVQTGGFSKESILPKRNSDKLIARKKDWDPKKYGGFDSPTVAYS VLVVAKVEKGKSKKLKSVKELLGITIMERSSFEKNPIDFLEAKGYKEVKKDLIIKLPKYS LFELENGRKRMLASAGELQKGNELALPSKYVNFLYLASHYEKLKGSPEDNEQKQLFVE QHKHYLDEIIEQISEFSKRVILADANLDKVLSAYNKHRDKPIREQAENIIHLFTLTNLGAP AAFKYFDTTIDRKRYTSTKEVLDATLIHQSITGLYETRIDLSQLGGDEGADKRTADGSEF ESPKKKRKV (SEQ ID NO: 259), or a polynucleotide encoding the base editor, where the guide RNA targets the polynucleotide programmable DNA binding domain to induce an A to G nucleobase change in the promoter region of HBG1/2, thereby obtaining edited hematopoietic stem cells or progenitors thereof; and (b) administering the nucleobase-edited hematopoietic stem cells or progenitors thereof to a subject in an effective amount to obtain engraftment of the nucleobase-edited hematopoietic stem cells or progenitors thereof in tissues of the subject after administration.

[0011] In an aspect, the invention features a method of treating a hemoglobinopathy in a subject. The method involves: (a) contacting hematopoietic stem cells or progenitors thereof in vitro with a guide RNA and a base editor containing an amino acid sequence with at least 80% sequence identity to one of the following two amino acid sequences MSEVEFSHEYWMRHALTLAKRARDEREVPVGAVLVLNNRVIGEGWNRAIGLHDPTAH AEIMALRQGGLVMQNYRLIDATLYVTFEPCVMCAGAMIHSRIGRVVFGVRNAKTGAAG SLMDVLHHPGMNHRVEITEGILADECAALLCRFFRMPRRVFNAQKKAQSSTDSGGSSG GSSGSETPGTSESATPESSGGSSGGSDKKYSIGLAIGTNSVGWAVITDEYKVPSKKFKVL GNTDRHSIKKNLIGALLFDSGETAEATRLKRTARRRYTRRKNRICYLQEIFSNEMAKVD DSFFHRLEESFLVEEDKKHERHPIFGNIVDEVAYHEKYPTIYHLRKKLVDSTDKADLRLI YLALAHMIKFRGHFLIEGDLNPDNSDVDKLFIQLVQTYNQLFEENPINASGVDAKAILSA RLSKSRRLENLIAQLPGEKKNGLFGNLIALSLGLTPNFKSNFDLAEDAKLQLSKDTYDDD LDNLLAQIGDQYADLFLAAKNLSDAILLSDILRVNTEITKAPLSASMIKRYDEHHQDLTL LKALVRQQLPEKYKEIFFDQSKNGYAGYIDGGASQEEFYKFIKPILEKMDGTEELLVKLN REDLLRKQRTFDNGSIPHQIHLGELHAILRRQEDFYPFLKDNREKIEKILTFRIPYYVGPLA RGNSRFAWMTRKSEETITPWNFEEVVDKGASAQSFIERMTNFDKNLPNEKVLPKHSLLY EYFTVYNELTKVKYVTEGMRKPAFLSGEQKKAIVDLLFKTNRKVTVKQLKEDYFKKIE CFDSVEISGVEDRFNASLGTYHDLLKIIKDKDFLDNEENEDILEDIVLTLTLFEDREMIEER LKTYAHLFDDKVMKQLKRRRYTGWGRLSRKLINGIRDKQSGKTILDFLKSDGFANRNF MQLIHDDSLTFKEDIQKAQVSGQGDSLHEHIANLAGSPAIKKGILQTVKVVDELVKVMG RHKPENIVIEMARENQTTQKGQKNSRERMKRIEEGIKELGSQILKEHPVENTQLQNEKLY LYYLQNGRDMYVDQELDINRLSDYDVDHIVPQSFLKDDSIDNKVLTRSDKNRGKSDNV PSEEVVKKMKNYWRQLLNAKLITQRKFDNLTKAERGGLSELDKAGFIKRQLVETRQITK HVAQILDSRMNTKYDENDKLIREVKVITLKSKLVSDFRKDFQFYKVREINNYHHAHDA YLNAVVGTALIKKYPKLESEFVYGDYKVYDVRKMIAKSEQEIGKATAKYFFYSNIMNFF KTEITLANGEIRKRPLIETNGETGEIVWDKGRDFATVRKVLSMPQVNIVKKTEVQTGGFS KESILPKRNSDKLIARKKDWDPKKYGGFDSPTVAYSVLVVAKVEKGKSKKLKSVKELL GITIMERSSFEKNPIDFLEAKGYKEVKKDLIIKLPKYSLFELENGRKRMLASAGELQKGN ELALPSKYVNFLYLASHYEKLKGSPEDNEQKQLFVEQHKHYLDEIIEQISEFSKRVILAD ANLDKVLSAYNKHRDKPIREQAENIIHLFTLTNLGAPAAFKYFDTTIDRKRYTSTKEVLD ATLIHQSITGLYETRIDLSQLGGDEGADKRTADGSEFESPKKKRKV (SEQ ID NO: 258), and MSEVEFSHEYWMRHALTLAKRAWDEREVPVGAVLVHNNRVIGEGWNRPIGRHDPTAH AEIMALRQGGLVMQNYRLIDATLYVTLEPCVMCAGAMIHSRIGRVVFGARDAKTGAA GSLMDVLHHPGMNHRVEITEGILADECAALLSDFFRMRRQEIKAQKKAQSSTDSGGSSG GSSGSETPGTSESATPESSGGSSGGSSEVEFSHEYWMRHALTLAKRARDEREVPVGAVL VLNNRVIGEGWNRAIGLHDPTAHAEIMALRQGGLVMQNYRLIDATLYVTFEPCVMCAG AMIHSRIGRVVFGVRNAKTGAAGSLMDVLHHPGMNHRVEITEGILADECAALLCRFFR MPRRVFNAQKKAQSSTDSGGSSGGSSGSETPGTSESATPESSGGSSGGSDKKYSIGLAIG TNSVGWAVITDEYKVPSKKFKVLGNTDRHSIKKNLIGALLFDSGETAEATRLKRTARRR YTRRKNRICYLQEIFSNEMAKVDDSFFHRLEESFLVEEDKKHERHPIFGNIVDEVAYHEK YPTIYHLRKKLVDSTDKADLRLIYLALAHMIKFRGHFLIEGDLNPDNSDVDKLFIQLVQT YNQLFEENPINASGVDAKAILSARLSKSRRLENLIAQLPGEKKNGLFGNLIALSLGLTPNF KSNFDLAEDAKLQLSKDTYDDDLDNLLAQIGDQYADLFLAAKNLSDAILLSDILRVNTEI TKAPLSASMIKRYDEHHQDLTLLKALVRQQLPEKYKEIFFDQSKNGYAGYIDGGASQEE FYKFIKPILEKMDGTEELLVKLNREDLLRKQRTFDNGSIPHQIHLGELHAILRRQEDFYPF LKDNREKIEKILTFRIPYYVGPLARGNSRFAWMTRKSEETITPWNFEEVVDKGASAQSFI ERMTNFDKNLPNEKVLPKHSLLYEYFTVYNELTKVKYVTEGMRKPAFLSGEQKKAIVD LLFKTNRKVTVKQLKEDYFKKIECFDSVEISGVEDRFNASLGTYHDLLKIIKDKDFLDNE ENEDILEDIVLTLTLFEDREMIEERLKTYAHLFDDKVMKQLKRRRYTGWGRLSRKLINGI RDKQSGKTILDFLKSDGFANRNFMQLIHDDSLTFKEDIQKAQVSGQGDSLHEHIANLAG SPAIKKGILQTVKVVDELVKVMGRHKPENIVIEMARENQTTQKGQKNSRERMKRIEEGI KELGSQILKEHPVENTQLQNEKLYLYYLQNGRDMYVDQELDINRLSDYDVDHIVPQSFL KDDSIDNKVLTRSDKNRGKSDNVPSEEVVKKMKNYWRQLLNAKLITQRKFDNLTKAE RGGLSELDKAGFIKRQLVETRQITKHVAQILDSRMNTKYDENDKLIREVKVITLKSKLVS DFRKDFQFYKVREINNYHHAHDAYLNAVVGTALIKKYPKLESEFVYGDYKVYDVRKMI AKSEQEIGKATAKYFFYSNIMNFFKTEITLANGEIRKRPLIETNGETGEIVWDKGRDFATV RKVLSMPQVNIVKKTEVQTGGFSKESILPKRNSDKLIARKKDWDPKKYGGFDSPTVAYS VLVVAKVEKGKSKKLKSVKELLGITIMERSSFEKNPIDFLEAKGYKEVKKDLIIKLPKYS LFELENGRKRMLASAGELQKGNELALPSKYVNFLYLASHYEKLKGSPEDNEQKQLFVE QHKHYLDEIIEQISEFSKRVILADANLDKVLSAYNKHRDKPIREQAENIIHLFTLTNLGAP AAFKYFDTTIDRKRYTSTKEVLDATLIHQSITGLYETRIDLSQLGGDEGADKRTADGSEF ESPKKKRKV (SEQ ID NO: 259), or a polynucleotide encoding the base editor, where the guide RNA targets the polynucleotide programmable DNA binding domain to induce an A to G nucleobase change in a target hemoglobin (HBB) gene or in the promoter region of HBG1/2, thereby obtaining edited hematopoietic stem cells or progenitors thereof; and

(b) administering the nucleobase-edited hematopoietic stem cells or progenitors thereof to a subject in an effective amount to obtain engraftment of the nucleobase-edited hematopoietic stem cells or progenitors thereof in tissues of the subject after administration.

[0012] In an aspect, the invention features a kit for use in the method of any one of the above aspects, where the kit contains the guide RNA and a polynucleotide encoding the base editor.

[0013] In any of the above aspects and/or embodiments thereof, the nucleobase change is an A to G nucleobase change.

[0014] In any of the above aspects and/or embodiments thereof, the deaminase domain is an adenosine deaminase domain and shares at least 85% sequence identity with the sequence MSEVEFSHEYWMRHALTLAKRARDEREVPVGAVLVLNNRVIGEGWNRAIGLHDPTAH AEIMALRQGGLVMQNYRLIDATLYVTFEPCVMCAGAMIHSRIGRVVFGVRNAKTGAAG SLMDVLHYPGMNHRVEITEGILADECAALLCYFFRMPRQVFNAQKKAQSSTD (SEQ ID NO: 3), and the adenosine deaminase domain is capable of catalyzing the hydrolytic deamination of adenine or adenosine. In embodiments, the adenosine deaminase domain contains one or more of the following alterations. Y123H, Q154S, and Q154R. In embodiments, the adenosine deaminase domain contains one or more of the following alterations: Y147T, Y147R, Q154S, Y123H, and Q154R. In embodiments, the adenosine deaminase domain contains a combination of alterations selected from one or more of the following: Y147R, Q154R, and Y123H; Y147R, Q154R, and I76Y: Y147R, Q154R, and T166R; Y147T and Q154R; Y147T and Q154S; and Y123H, Y147R, Q154R, and I76Y. In embodiments, the adenosine deaminase domain contains the alterations Y147R, Q154R, and Y123H. In embodiments, the adenosine deaminase domain contains an alteration at position 82 or 166. In embodiments, the alteration at position 82 is V82S. In embodiments, the alteration at position 166 is T166R. In embodiments, the adenosine deaminase domain contains an alteration at positions 166 and 82. In embodiments, the adenosine deaminase domain has at least 90% sequence identity to the sequence.

[0015] In any of the above aspects and/or embodiments thereof, the deaminase domain is a TadA*8 variant. In any of the above aspects and/or embodiments thereof, the TadA*8 variant is selected from one or more of the following: TadA*8.1, TadA*8.2, TadA*8.3, TadA*8.4, TadA*8.5, TadA*8.6, TadA*8.7, TadA*8.8, TadA*8.9, TadA*8.10, TadA*8.11, TadA*8.12, and TadA*8.13. In any of the above aspects and/or embodiments thereof, the base editor is an ABE8 base editor selected from one or more of the following: ABE8.1, ABE8.2, ABE8.3, ABE8.4, ABE8.5, ABE8.6, ABE8.7, ABE8.8, ABE8.9, ABE8.10, ABE8.11, ABE8.12, and ABE8.13.

[0016] In any of the above aspects and/or embodiments thereof, the base editor further contains a wild-type adenosine deaminase domain.

[0017] In any of the above aspects and/or embodiments thereof, the polynucleotide programmable DNA binding domain is a Cas9. In embodiments, the Cas9 is a SpCas9, a SaCas9, or a variant thereof.

[0018] In any of the above aspects and/or embodiments thereof, the polynucleotide programmable DNA binding domain contains a modified Cas9 having an altered protospacer-adjacent motif (PAM) specificity. In embodiments, the Cas9 has specificity for a PAM sequence selected from one or more of the following NGG, NGA, NGCG, NGN, NNGRRT, NNNRRT, NGCG, NGCN, NGTN, and NGC, where N is A, G, C, or T and where R is A or G.

[0019] In any of the above aspects and/or embodiments thereof, the polynucleotide programmable DNA binding domain is nuclease inactive. In any of the above aspects and/or embodiments thereof, the polynucleotide programmable DNA binding domain is a nickase. In any of the above aspects and/or embodiments thereof, the polynucleotide programmable DNA binding domain contains the alterations D10A and/or H840A. In any of the above aspects and/or embodiments thereof, the polynucleotide programmable DNA binding domain contains the alteration D10A.

[0020] In any of the above aspects and/or embodiments thereof, the deaminase domain contains an adenosine deaminase monomer. In any of the above aspects and/or embodiments thereof, the deaminase domain contains an adenosine deaminase dimer.

[0021] In any of the above aspects and/or embodiments thereof, the engraftment efficiency of the nucleobase-edited hematopoietic stem cells or progenitors thereof is measured in the subject at about 1 week, 2 weeks, 3 weeks, 4 weeks, 5 weeks, 6 weeks, 7 weeks, or 8 or more weeks after administering the cells to the subject. In any of the above aspects and/or embodiments thereof, the engraftment efficiency of the nucleobase-edited hematopoietic stem cells or progenitors thereof is measured in the subject at least 8 weeks after administering the cells to the subject. In any of the above aspects and/or embodiments thereof, the engraftment efficiency of the nucleobase-edited hematopoietic stem cells or progenitors thereof is measured in the subject at least 16 weeks after administering the cells to the subject. In embodiments, the measured engraftment efficiency is at least about 20%. In embodiments, the measured engraftment efficiency is at least about 30%. In embodiments, the measured engraftment efficiency is at least about 40%. In embodiments, the measured engraftment efficiency is at least about 50%.

[0022] In any of the above aspects and/or embodiments thereof, at least about 50% of the hematopoietic cells or progenitors thereof in (b) are viable. In any of the above aspects and/or embodiments thereof, at least 30% of the hematopoietic cells or progenitors thereof in (b) contain the nucleobase change. In any of the above aspects and/or embodiments thereof, at least 50% of the hematopoietic cells or progenitors thereof in (b) contain the nucleobase change. In any of the above aspects and/or embodiments thereof, at least 60% of the hematopoietic cells or progenitors thereof in (b) contain the nucleobase change. In any of the above aspects and/or embodiments thereof, at least 70% of the hematopoietic cells or progenitors thereof in (b) contain the nucleobase change.

[0023] In any of the above aspects and/or embodiments thereof, the hematopoietic cells or progenitors thereof are isolated or derived from the subject.

[0024] In any of the above aspects and/or embodiments thereof, the hematopoietic stem cells or progenitors thereof contain a single-nucleotide polymorphism (SNP) associated with sickle cell disease (SCD). In embodiments, the SNP associated with SCD results in a E6V substitution in a hemoglobin beta unit encoded by the HBB gene. In any of the above aspects and/or embodiments thereof, the nucleobase change results in a E6A substitution in the hemoglobin beta unit encoded by the HBB gene.

[0025] In any of the above aspects and/or embodiments thereof, at least 30% of the hematopoietic stem cells or progenitors thereof retain base editing activity following engraftment. In any of the above aspects and/or embodiments thereof, at least 50% of the hematopoietic stem cells or progenitors thereof retain base editing activity following engraftment. In any of the above aspects and/or embodiments thereof, at least 60% of the hematopoietic stem cells or progenitors thereof retain base editing activity following engraftment. In any of the above aspects and/or embodiments thereof, at least 70% of the hematopoietic stem cells or progenitors thereof retain base editing activity following engraftment. In any of the above aspects and/or embodiments thereof, at least 80% of the hematopoietic stem cells or progenitors thereof retain base editing activity following engraftment. In any of the above aspects and/or embodiments thereof, at least 90% of the hematopoietic stem cells or progenitors thereof retain base editing activity following engraftment.

[0026] In any of the above aspects and/or embodiments thereof, the hematopoietic cells or progenitors thereof retain the ability to differentiate following administration. In any of the above aspects and/or embodiments thereof, the hematopoietic cells or progenitors thereof are capable of generating erythrocytes. In any of the above aspects and/or embodiments thereof, the polynucleotide encoding the base editor contains mRNA or is mRNA.

[0027] In any of the above aspects and/or embodiments thereof, the hematopoietic stem cells or progenitors thereof are contacted with at least about 1 nM of mRNA encoding the base editor. In any of the above aspects and/or embodiments thereof, the hematopoietic stem cells or progenitors thereof are contacted with at least about 3 nM RNA encoding the base editor. In any of the above aspects and/or embodiments thereof, the hematopoietic stem cells or progenitors thereof are contacted with at least about 10 nM RNA encoding the base editor. In any of the above aspects and/or embodiments thereof, the hematopoietic stem cells or progenitors thereof are contacted with at least about 30 nM RNA encoding the base editor. In any of the above aspects and/or embodiments thereof, the hematopoietic stem cells or progenitors thereof are contacted with at least about 50 nM RNA encoding the base editor. In any of the above aspects and/or embodiments thereof, the hematopoietic stem cells or progenitors thereof are contacted with at least about 3000 nM of the gRNA.

[0028] In any of the above aspects and/or embodiments thereof, levels of fetal hemoglobin (HbF) are increased in the subject following engraftment relative to the levels in a control subject that received unedited hematopoietic stem cells or progenitors thereof. In any of the above aspects and/or embodiments thereof, levels of fetal hemoglobin (HbF) are increased in the subject by at least about 20% relative to the levels in a control subject that received unedited hematopoietic stem cells or progenitors thereof. In any of the above aspects and/or embodiments thereof, HbS expression is reduced in the subject in the subject following engraftment relative to HbS expression in a control subject that received unedited hematopoietic stem cells or progenitors thereof. In any of the above aspects and/or embodiments thereof, HbS expression is reduced in the subject by at least about 20% relative to HbS expression in a control subject that received unedited hematopoietic stem cells or progenitors thereof.

[0029] In any of the above aspects and/or embodiments thereof, the nucleobase-edited hematopoietic stem cells or progenitors thereof express CD34 (e.g., are CD34⁺). In any of the above aspects and/or embodiments thereof, the nucleobase-edited hematopoietic stem cells or progenitors thereof express one or more of CD34, CD45, CD19, and GlyA. In any of the above aspects and/or embodiments thereof, the nucleobase-edited hematopoietic stem cells or progenitors thereof are GlyA⁺.

[0030] In any of the above aspects and/or embodiments thereof, the nucleobase-edited hematopoietic stem cells or progenitors thereof express fetal hemoglobin (HbF).

[0031] In any of the above aspects and/or embodiments thereof, the hematopoietic stem cells or progenitors thereof are human hematopoietic stem cells or progenitors thereof. In any of the above aspects and/or embodiments thereof, the subject is a mammal. In any of the above aspects and/or embodiments thereof, the subject is a human.

[0032] In any of the above aspects and/or embodiments thereof, the subject has sickle cell disease (SCD), thalassemia, and/or anemia. In any of the above aspects and/or embodiments thereof, the subject has SCD.

[0033] In any of the above aspects and/or embodiments thereof, the nucleobase-edited hematopoietic stem cells or progenitors thereof are autologous to the subject.

[0034] In any of the above aspects and/or embodiments thereof, the nucleobase-edited hematopoietic stem cells or progenitors thereof are not enriched prior to administration. In any of the above aspects and/or embodiments thereof, the nucleobase-edited hematopoietic stem cells or progenitors thereof are enriched prior to administration.

[0035] In any of the above aspects and/or embodiments thereof, the nucleobase change abolishes, disrupts, or reduces BCL11A binding in the promoter region of HBG1/2. In any of the above aspects and/or embodiments thereof, the nucleobase change is at a position selected from −114, −117, −175, and −198 in the promoter region of HBG1/2. In any of the above aspects and/or embodiments thereof, the nucleobase change is associated with an increase in expression of HBG1/2.

[0036] In any of the above aspects and/or embodiments thereof, the nucleobase change is associated with an increase in levels of hemoglobin gamma subunit in the hematopoietic stem cells or progenitors thereof. In any of the above aspects and/or embodiments thereof, an increased level of HbF protein is expressed in the subject after administration. In any of the above aspects and/or embodiments thereof, the administration results in expression of HbF in the subject for at least 8 weeks. In any of the above aspects and/or embodiments thereof, the administration results in expression of HbF in the subject for at least 16 weeks.

[0037] In any of the above aspects and/or embodiments thereof, the administration reduces or ameliorates a symptom associated with sickle cell disease in the subject. In any of the above aspects and/or embodiments thereof, erythrocytes generated from the hematopoietic cells or progenitors thereof exhibit reduced sickling.

[0038] In any of the above aspects and/or embodiments thereof, at least 50% editing is retained at least 16 weeks after the administration in a tissue of the subject. In any of the above aspects and/or embodiments thereof, at least 80% editing is retained 16 weeks after the administration in a tissue of the subject.

[0039] In any of the above aspects and/or embodiments thereof, administration is performed multiple times. In any of the above aspects and/or embodiments thereof, administration is performed multiple times at an interval of at least about one month.

[0040] In any of the above aspects and/or embodiments thereof, the guide RNA contains a nucleotide sequence selected from SEQ ID NOs: 130-155 listed in Table 1. In any of the above aspects and/or embodiments thereof, the gRNA contains or is the sequence, from 5′-3′: GACCAAUAGCCUUGACAGUUUUAGAGCUAGAAAUAGCAAGUUAAAAUAAGGCUA GUCCGUUAUCAACUUGAAAAAGUGGCACCGAGUCGGUGCU, corresponding to bases 4-97 of SEQ ID NO: 129. In any of the above aspects and/or embodiments thereof, the guide RNA contains or is the nucleotide sequence, from 5′-3′: csususGACCAAUAGCCUUGACAGUUUUAGAGCUAGAAAUAGCAAGUUAAAAUAAG GCUAGUCCGUUAUCAACUUGAAAAAGUGGCACCGAGUCGGUGCUsususu (SEQ ID NO: 129), where lowercase characters indicate 2′-O-methylated nucleobases, and “s” indicates phosphorothioates (SEQ ID NO: 129). In any of the above aspects and/or embodiments thereof, the guide RNA contains or is the nucleotide sequence of any one of 5′-gsascsUUCUCCACAGGAGUCAGGGUUUUAGAGCUAGAAAUAGCAAGUUAAAAUAA GGCUAGUCCGUUAUUCAACUUGAAAAAGUGGCACCGAGUCGGUGCUsususu-3′ (SEQ ID NO: 126), 5′-ascsusUCUCCACAGGAGUCAGGGUUUUAGAGCUAGAAAUAGCAAGUUAAAAUAAG GCUAGUCCGUUAUUCAACUUGAAAAAGUGGCACCGAGUCGGUGCUsususu-3′ (SEQ ID NO: 127), and 5′-csususCUCCACAGGAGUCAGGGUUUUAGAGCUAGAAAUAGCAAGUUAAAAUAAGG CUAGUCCGUUAUUCAACUUGAAAAAGUGGCACCGAGUCGGUGCUsususu-3′ (SEQ ID NO: 128), where lowercase characters indicate 2′-O-methylated nucleobases, and “s” indicates phosphorothioates.

[0041] In any of the above aspects and/or embodiments thereof, the administration is associated with hemoglobin subunit gamma being expressed in at least 50% of cells in the bone marrow of the subject. In any of the above aspects and/or embodiments thereof, the administration is associated with hemoglobin subunit gamma being expressed in at least 60% of cells in the bone marrow of the subject.

[0042] In any of the above aspects and/or embodiments thereof, the method further involves depletion of one or more lymphocytic lineage cells in the subject prior to administering the hematopoietic stem cells or progenitors thereof.

[0043] In any of the above aspects and/or embodiments thereof, the hematopoietic stem cells or progenitors thereof are enriched CD34⁺ cells, and the CD34⁺ cells are enriched from donor peripheral blood mononuclear cells (PBMCs) less than 24 hours after the PBMCs are collected or isolated from a donor. In any of the above aspects and/or embodiments thereof, the hematopoietic stem cells or progenitors thereof are enriched CD34⁺ cells, and the CD34⁺ cells are enriched from donor peripheral blood mononuclear cells (PBMCs) less than 48 hours after the PBMCs are collected or isolated from a donor. In any of the above aspects and/or embodiments thereof, the hematopoietic stem cells or progenitors thereof are cryopreserved following collection or isolation from a donor.

[0044] In any of the above aspects and/or embodiments thereof, the gRNA and/or the polynucleotide encoding the base editor contains a 2′-O-Methyl nucleotide modification. In any of the above aspects and/or embodiments thereof, the 2′-O-Methyl nucleotide modification is disposed at a 3′ or 5′ end of the gRNA and/or the polynucleotide encoding the base editor. In any of the above aspects and/or embodiments thereof, the gRNA and/or the polynucleotide encoding the base editor contains a phosphorothioate internucleotide linkage.

[0045] In any of the above aspects and/or embodiments thereof, the hematopoietic stem cells or progenitors thereof are contacted with the polynucleotide encoding the base editor. In any of the above aspects and/or embodiments thereof, the base editor is delivered as a polynucleotide that is expressed in the hematopoietic stem cells or progenitors thereof.

[0046] In any of the above aspects and/or embodiments thereof, engraftment of the nucleobase-edited hematopoietic stem cells or progenitors thereof is maintained in the subject for at least 8 weeks. In any of the above aspects and/or embodiments thereof, engraftment of the nucleobase-edited hematopoietic stem cells or progenitors thereof is maintained in the subject for at least 16 weeks. In any of the above aspects and/or embodiments thereof, the nucleobase-edited hematopoietic stem cells or progenitors thereof are contacted with the gRNA and the base editor within 24 hours following collection from a donor.

[0047] In any of the above aspects and/or embodiments thereof, the base editor shares at least 90% sequence identity to one of the following two sequences:

(SEQ ID NO: 258)
MSEVEFSHEYWMRHALTLAKRARDEREVPVGAVLVLNNRVIGEGWNRAIG
LHDPTAHAEIMALRQGGLVMQNYRLIDATLYVTFEPCVMCAGAMIHSRIG
RVVFGVRNAKTGAAGSLMDVLHHPGMNHRVEITEGILADECAALLCRFFR
MPRRVFNAQKKAQSSTDSGGSSGGSSGSETPGTSESATPESSGGSSGGSD
KKYSIGLAIGTNSVGWAVITDEYKVPSKKFKVLGNTDRHSIKKNLIGALL
FDSGETAEATRLKRTARRRYTRRKNRICYLQEIFSNEMAKVDDSFFHRLE
ESFLVEEDKKHERHPIFGNIVDEVAYHEKYPTIYHLRKKLVDSTDKADLR
LIYLALAHMIKFRGHFLIEGDLNPDNSDVDKLFIQLVQTYNQLFEENPIN
ASGVDAKAILSARLSKSRRLENLIAQIPGEKKNGLFGNLIALSLGLTPNF
KSNFDLAEDAKLQLSKDTYDDDLDNLLAQIGDQYADLFLAAKNLSDAILL
SDILRVNTEITKAPLSASMIKRYDEHHQDLTLLKALVRQQLPEKYKEIFF
DQSKNGYAGYIDGGASQEEFYKFIKPILEKMDGTEELLVKLNREDLLRKQ
RTFDNGSIPHQIHLGELHAILRRQEDFYPFLKDNREKIEKILTFRIPYYV
GPLARGNSRFAWMTRKSEETITPWNFEEVVDKGASAQSFIERMTNFDKNL
PNEKVLPKHSLLYEYFTVYNELTKVKYVTEGMRKPAFLSGEQKKAIVDLL
FKTNRKVTVKQLKEDYFKKIECFDSVEISGVEDRFNASLGTYHDLLKIIK
DKDFLDNEENEDILEDIVLTLTLFEDREMIEERLKTYAHLFDDKVMKQLK
RRRYTGWGRLSRKLINGIRDKQSGKTILDFLKSDGFANRNFMQLIHDDSL
TFKEDIQKAQVSGQGDSLHEHIANLAGSPAIKKGILQTVKVVDELVKVMG
RHKPENIVIEMARENQTTQKGQKNSRERMKRIEEGIKELGSQILKEHPVE
NTQLQNEKLYLYYLQNGRDMYVDQELDINRLSDYDVDHIVPQSFLKDDSI
DNKVLTRSDKNRGKSDNVPSEEVVKKMKNYWRQLLNAKLITQRKFDNLTK
AERGGLSELDKAGFIKRQLVETRQITKHVAQILDSRMNTKYDENDKLIRE
VKVITLKSKLVSDFRKDFQFYKVREINNYHHAHDAYLNAVVGTALIKKYP
KLESEFVYGDYKVYDVRKMIAKSEQEIGKATAKYFFYSNIMNFFKTEITL
ANGEIRKRPLIETNGETGEIVWDKGRDFATVRKVLSMPQVNIVKKTEVQT
GGFSKESILPKRNSDKLIARKKDWDPKKYGGFDSPTVAYSVLVVAKVEKG
KSKKLKSVKELLGITIMERSSFEKNPIDFLEAKGYKEVKKDLIIKLPKYS
LFELENGRKRMLASAGELQKGNELALPSKYVNFLYLASHYEKLKGSPEDN
EQKQLFVEQHKHYLDEIIEQISEFSKRVILADANLDKVLSAYNKHRDKPI
REQAENIIHLFTLTNLGAPAAFKYFDTTIDRKRYTSTKEVLDATLIHQSI
TGLYETRIDLSQLGGDEGADKRTADGSEFESPKKKRKV,
and
(SEQ ID NO: 259)
MSEVEFSHEYWMRHALTLAKRAWDEREVPVGAVLVHNNRVIGEGWNRPIG
RHDPTAHAEIMALRQGGLVMQNYRLIDATLYVTLEPCVMCAGAMIHSRIG
RVVFGARDAKTGAAGSLMDVLHHPGMNHRVEITEGILADECAALLSDFFR
MRRQEIKAQKKAQSSTDSGGSSGGSSGSETPGTSESATPESSGGSSGGSS
EVEFSHEYWMRHALTLAKRARDEREVPVGAVLVLNNRVIGEGWNRAIGLH
DPTAHAEIMALRQGGLVMQNYRLIDATLYVTFEPCVMCAGAMIHSRIGRV
VFGVRNAKTGAAGSLMDVLHHPGMNHRVEITEGILADECAALLCRFFRMP
RRVFNAQKKAQSSTDSGGSSGGSSGSETPGTSESATPESSGGSSGGSDKK
YSIGLAIGTNSVGWAVITDEYKVPSKKFKVLGNTDRHSIKKNLIGALLFD
SGETAEATRLKRTARRRYTRRKNRICYLQEIFSNEMAKVDDSFFHRLEES
FLVEEDKKHERHPIFGNIVDEVAYHEKYPTIYHLRKKLVDSTDKADLRLI
YLALAHMIKFRGHFLIEGDLNPDNSDVDKLFIQLVQTYNQLFEENPINAS
GVDAKAILSARLSKSRRLENLIAQLPGEKKNGLFGNLIALSLGLTPNFKS
NFDLAEDAKLQLSKDTYDDDLDNLLAQIGDQYADLFLAAKNLSDAILLSD
ILRVNTEITKAPLSASMIKRYDEHHQDLTLLKALVRQQLPEKYKEIFFDQ
SKNGYAGYIDGGASQEEFYKFIKPILEKMDGTEELLVKLNREDLLRKQRT
FDNGSIPHQIHLGELHAILRRQEDFYPFLKDNREKIEKILTFRIPYYVGP
LARGNSRFAWMTRKSEETITPWNFEEVVDKGASAQSFIERMTNFDKNLPN
EKVLPKHSLLYEYFTVYNELTKVKYVTEGMRKPAFLSGEQKKAIVDLLFK
TNRKVTVKQLKEDYFKKIECFDSVEISGVEDRFNASLGTYHDLLKIIKDK
DFLDNEENEDILEDIVLTLTLFEDREMIEERLKTYAHLFDDKVMKQLKRR
RYTGWGRLSRKLINGIRDKQSGKTILDFLKSDGFANRNFMQLIHDDSLTF
KEDIQKAQVSGQGDSLHEHIANLAGSPAIKKGILQTVKVVDELVKVMGRH
KPENIVIEMARENQTTQKGQKNSRERMKRIEEGIKELGSQILKEHPVENT
QLQNEKLYLYYLQNGRDMYVDQELDINRLSDYDVDHIVPQSFLKDDSIDN
KVLTRSDKNRGKSDNVPSEEVVKKMKNYWRQLLNAKLITQRKFDNLTKAE
RGGLSELDKAGFIKRQLVETRQITKHVAQILDSRMNTKYDENDKLIREVK
VITLKSKLVSDFRKDFQFYKVREINNYHHAHDAYLNAVVGTALIKKYPKL
ESEFVYGDYKVYDVRKMIAKSEQEIGKATAKYFFYSNIMNFFKTEITLAN
GEIRKRPLIETNGETGEIVWDKGRDFATVRKVLSMPQVNIVKKTEVQTGG
FSKESILPKRNSDKLIARKKDWDPKKYGGFDSPTVAYSVLVVAKVEKGKS
KKLKSVKELLGITIMERSSFEKNPIDFLEAKGYKEVKKDLIIKLPKYSLF
ELENGRKRMLASAGELQKGNELALPSKYVNFLYLASHYEKLKGSPEDNEQ
KQLFVEQHKHYLDEIIEQISEFSKRVILADANLDKVLSAYNKHRDKPIRE
QAENIIHLFTLTNLGAPAAFKYFDTTIDRKRYTSTKEVLDATLIHQSITG
LYETRIDLSQLGGDEGADKRTADGSEFESPKKKRKV.

[0048] In any of the above aspects and/or embodiments thereof, the base editor shares at least 95% sequence identity to one of the following two sequences:

(SEQ ID NO: 258)
MSEVEFSHEYWMRHALTLAKRARDEREVPVGAVLVLNNRVIGEGWNRAIG
LHDPTAHAEIMALRQGGLVMQNYRLIDATLYVTFEPCVMCAGAMIHSRIG
RVVFGVRNAKTGAAGSLMDVLHHPGMNHRVEITEGILADECAALLCRHRM
PRRVFNAQKKAQSSTDSGGSSGGSSGSETPGTSESATPESSGGSSGGSDK
KYSIGLAIGTNSVGWAVITDEYKVPSKKFKVLGNTDRHSIKKNLIGALLF
DSGETAEATRLKRTARRRYTRRKNRICYLQEIFSNEMAKVDDSFFHRLEE
SFLVEEDKKHERHPIFGNIVDEVAYHEKYPTIYHLRKKLVDSTDKADLRL
IYLALAHMIKFRGHFLIEGDLNPDNSDVDKLFIQLVQTYNQLFEENPINA
SGVDAKAILSARLSKSRRLENLIAQIPGEKKNGLFGNLIALSLGLTPNFK
SNFDLAEDAKLQLSKDTYDDDLDNLLAQIGDQYADLFLAAKNLSDAILLS
DILRVNTEITKAPLSASMIKRYDEHHQDLTLLKALVRQQLPEKYKEIFFD
QSKNGYAGYIDGGASQEEFYKFIKPILEKMDGTEELLVKLNREDLLRKQR
TFDNGSIPHQIHLGELHAILRRQEDFYPFLKDNREKIEKILTFRIPYYVG
PLARGNSRFAWMTRKSEETITPWNFEEVVDKGASAQSFIERMTNFDKNLP
NEKVLPKHSLLYEYFTVYNELTKVKYVTEGMRKPAFLSGEQKKAIVDLLF
KTNRKVTVKQLKEDYFKKIECFDSVEISGVEDRFNASLGTYHDLLKIIKD
KDFLDNEENEDILEDIVLTLTLFEDREMIEERLKTYAHLFDDKVMKQLKR
RRYTGWGRLSRKLINGIRDKQSGKTILDFLKSDGFANRNFMQLIHDDSLT
FKEDIQKAQVSGQGDSLHEHIANLAGSPAIKKGILQTVKVVDELVKVMGR
HKPENIVIEMARENQTTQKGQKNSRERMKRIEEGIKELGSQILKEHPVEN
TQLQNEKLYLYYLQNGRDMYVDQELDINRLSDYDVDHIVPQSFLKDDSID
NKVLTRSDKNRGKSDNVPSEEVVKKMKNYWRQLLNAKLITQRKFDNLTKA
ERGGLSELDKAGFIKRQLVETRQITKHVAQILDSRMNTKYDENDKLIREV
KVITLKSKLVSDFRKDFQFYKVREINNYHHAHDAYLNAVVGTALIKKYPK
LESEFVYGDYKVYDVRKMIAKSEQEIGKATAKYFFYSNIMNFFKTEITLA
NGEIRKRPLIETNGETGEIVWDKGRDFATVRKVLSMPQVNIVKKTEVQTG
GFSKESILPKRNSDKLIARKKDWDPKKYGGFDSPTVAYSVLVVAKVEKGK
SKKLKSVKELLGITIMERSSFEKNPIDFLEAKGYKEVKKDLIIKLPKYSL
FELENGRKRMLASAGELQKGNELALPSKYVNFLYLASHYEKLKGSPEDNE
QKQLFVEQHKHYLDEIIEQISEFSKRVILADANLDKVLSAYNKHRDKPIR
EQAENIIHLFTLTNLGAPAAFKYFDTTIDRKRYTSTKEVLDATLIHQSIT
GLYETRIDLSQLGGDEGADKRTADGSEFESPKKKRKV,
and
(SEQ ID NO: 259)
MSEVEFSHEYWMRHALTLAKRAWDEREVPVGAVLVHNNRVIGEGWNRPIG
RHDPTAHAEIMALRQGGLVMQNYRLIDATLYVTLEPCVMCAGAMIHSRIG
RVVFGARDAKTGAAGSLMDVLHHPGMNHRVEITEGILADECAALLSDFFR
MRRQEIKAQKKAQSSTDSGGSSGGSSGSETPGTSESATPESSGGSSGGSS
EVEFSHEYWMRHALTLAKRARDEREVPVGAVLVLNNRVIGEGWNRAIGLH
DPTAHAEIMALRQGGLVMQNYRLIDATLYVTFEPCVMCAGAMIHSRIGRV
VFGVRNAKTGAAGSLMDVLHHPGMNHRVEITEGILADECAALLCRFFRMP
RRVFNAQKKAQSSTDSGGSSGGSSGSETPGTSESATPESSGGSSGGSDKK
YSIGLAIGTNSVGWAVITDEYKVPSKKFKVLGNTDRHSIKKNLIGALLFD
SGEIAEATRLKRTARRRYTRRKNRICYLQEIFSNEMAKVDDSFFHRLEES
FLVEEDKKHERHPIFGNIVDEVAYHEKYPTIYHLRKKLVDSTDKADLRLI
YLALAHMIKFRGHFLIEGDLNPDNSDVDKLFIQLVQTYNQLFEENPINAS
GVDAKAILSARLSKSRRLENLIAQLPGEKKNGLFGNLIALSLGLTPNFKS
NFDLAEDAKLQLSKDTYDDDLDNLLAQIGDQYADLFLAAKNLSDAILLSD
ILRVNTEITKAPLSASMIKRYDEHHQDLTLLKALVRQQLPEKYKEIFFDQ
SKNGYAGYIDGGASQEEFYKFIKPILEKMDGTEELIVKLNREDLLRKQRT
FDNGSIPHQIHLGELHAILRRQEDFYPFLKDNREKIEKILTFRIPYYVGP
LARGNSRFAWMTRKSEETITPWNFEEVVDKGASAQSFIERMTNFDKNLPN
EKVLPKHSLLYEYFTVYNELTKVKYVTEGMRKPAFLSGEQKKAIVDLLFK
TNRKVTVKQLKEDYFKKIECFDSVEISGVEDRFNASLGTYHDLLKIIKDK
DFLDNEENEDILEDIVLTLTLFEDREMIEERLKTYAHLFDDKVMKQLKRR
RYTGWGRLSRKLINGISPAIKKGILQTVKVVDELVKVMGRHKPENIVIEM
ARENQTTQKGQKNSRERMKRIEEGIKELGSQILKEHPVENTQLQNEKLYL
YYLQNGRDMYYDQELDINRLSDYDVDHIVPQSFLKDDSIDNKVLTRSDKN
RGKSDNVPSEEVVKKMKNYWRQLLNAKLITQRKFDNLTKAERGGLSELDK
AGFIKRQLVETRQITKHVAQILDSRMNTKYDENDKLIREVKVITLKSKLV
SDFRKDFQFYKVREINNYHHAHDAYLNAVVGTALIKKYPKLESEFVYGDY
KVYDVRKMIAKSEQEIGKATAKYFFYSNIMNFKTEHLANGEIRKKPLIET
NGETGEIVWDKGRDFATVRKVLSMPQVNIVKKTEVQTGGFSKESILPKRN
SDKLIARKKDWDPKKYGGFDSPTVAYSVLVVAKVEKGKSKKLKSVKELLG
ITIMERSSFEKNPIDFLEAKGYKEVKKDLIIKLPKYSLFELENGRKRMLA
SAGELQKGNELALPSKYVNFLYLASHYEKLKGSPEDNEQKQLFVEQHKHY
LDEIIEQISEFSKRVILADANLDKVLSAYNKHRDKPIREQAENIIHLFTL
TNLGAPAAFKYFDTTIDRKRYTSTKEVLDATLIHQSITGLYETRIDLSQL
GGDEGADKRTADGSEFESPKKKRKV.

[0049] The description and examples herein illustrate embodiments of the present disclosure in detail. It is to be understood that this disclosure is not limited to the particular embodiments described herein and as such can vary. Those of skill in the art will recognize that there are numerous variations and modifications of this disclosure, which are encompassed within its scope.

[0050] Although various features of the present disclosure can be described in the context of a single embodiment, the features can also be provided separately or in any suitable combination. Conversely, although the present disclosure can be described herein in the context of separate embodiments for clarity, the present disclosure can also be implemented in a single embodiment. The section headings used herein are for organizational purposes only and are not to be construed as limiting the subject matter described.

[0051] The features of the present disclosure are set forth with particularity in the appended claims. A better understanding of the features and advantages of the present will be obtained by reference to the following detailed description that sets forth illustrative embodiments, in which the principles of the disclosure are utilized, and in view of the accompanying drawings as described hereinbelow.

### Definitions

[0052] Unless defined otherwise, all technical and scientific terms used herein have the meaning commonly understood by a person skilled in the art to which this invention belongs. The following references provide one of skill with a general definition of many of the terms used in this invention: Singleton et al., Dictionary of Microbiology and Molecular Biology (2nd ed. 1994); The Cambridge Dictionary of Science and Technology (Walker ed., 1988); The Glossary of Genetics, 5th Ed., R. Rieger et al. (eds.), Springer Verlag (1991); and Hale & Marham, The Harper Collins Dictionary of Biology (1991). As used herein, the following terms have the meanings ascribed to them below, unless specified otherwise.

[0053] The term “engraftment” or “engrafting” as used herein refers to the process by which cells administered to a subject, e.g. a recipient, as well as precursors and descendants of the cells, are incorporated into a tissue or organ of the subject. In an embodiment, the tissue is bone marrow. In embodiments, the cell is a hematopoietic stem cell (HSC), a progenitor of a hematopoietic stem cell, or a bone marrow cell. In embodiments, cells administered, introduced, or transplanted into a recipient for engraftment, travel through the bloodstream and home to free bone marrow (BM) niches which provide optimal conditions for their survival, proliferation, and generation of new blood cells, including red blood cells (erythrocytes), white blood cells (leukocytes, such as monocytes, macrophages and neutrophils) and platelets.

[0054] “Engraftment efficiency” refers to the fraction or percentage of cells (e.g., donor cells) incorporated in a tissue (e.g., bone marrow) or organ following administration (e.g., transplantation) into a recipient subject. In embodiments, engraftment efficiency is measured 1 week, 2 weeks, 3 weeks, 4 weeks, 5 weeks, 6 weeks, 7 weeks, 8 weeks, 9 weeks, 10 weeks, 11 weeks, 12 weeks, 13 weeks, 14 weeks, 15 weeks, 16 weeks, 17 weeks, 18 weeks, 19 weeks, or weeks following administration of the cells to a subject. Such incorporated cells constitute those that were administered to the subject (and/or descendants thereof following administration of the cell(s) to the subject). For example, engraftment efficiency of a donor hematopoietic stem cell (HSC) administered to a subject and comprising a nucleobase change (i.e., an “edited” or “nucleobase-edited” cell) may be expressed as the percentage of donor cells in a tissue (e.g., bone marrow) of the subject comprising the nucleobase change and/or cells descended from the HSC administered. Engraftment efficiency may be monitored by measuring complete blood cell count (and assessing blood cell lineages and phenotypes) over repeated time periods. An increase in counts of cells administered to a subject and descendants thereof over time indicates that engraftment is occurring or has occurred. In an embodiment, the HSC, progenitors of hematopoietic stem cells, or bone marrow cells that are engrafted are nucleobase-edited. In an embodiment, the nucleobase editing induces an A to G nucleobase change in the promoter region of the HBG1/2 polynucleotide. In general, the cells or nucleobase-edited cells that are engrafted, e.g., HSC, progenitors of hematopoietic stem cells, or bone marrow cells, into tissues or organs of a recipient subject are also termed “donor” cells. In an embodiment, the cells are obtained from a donor subject.

[0055] As used herein, sickle cell disease (SCD) refers to a group of disorders that affects hemoglobin, the molecule in red blood cells that delivers oxygen to cells throughout the body. Individuals with this disorder have atypical hemoglobin molecules, which can distort red blood cells into a sickle, or crescent, shape. SCD affects beta globin function and can lead to severe anemia and progressive multiple organ failure. The clinical manifestations of sickle cell disease (SCD) result from intermittent episodes of microvascular occlusion leading to tissue ischemia/reperfusion injury and chronic hemolysis. Vaso-occlusive events are associated with ischemia/reperfusion damage to tissues resulting in pain and acute or chronic injury affecting any organ system. The bones/marrow, spleen, liver, brain, lungs, kidneys, and joints are often affected. SCD is a genetic disorder characterized by the presence of at least one hemoglobin S allele (HbS; p.Glu6Val in HbB) and a second HbB pathogenic variant resulting in abnormal hemoglobin polymerization. HbS/S (homozygous p.Glu6Val in HbB) accounts for 60%-70/o of sickle cell disease (SCD) in the United States. The life expectancy for men and women suffering from sickle cell disease (SCD) is only 42 and 48 years, respectively.

[0056] By “β-globin (HbB) protein” is meant a polypeptide or fragment thereof having at least about 95% amino acid sequence identity to NCBI Accession No. NP_000509. In particular embodiments, a β-globin protein comprises one or more alterations relative to the following reference sequence. In one particular embodiment, a β-globin protein associated with sickle cell disease comprises an E6V (also termed E7V) mutation.

[0057] By “HbB polynucleotide” is meant a nucleic acid molecule encoding β-globin protein or a fragment thereof. The sequence of an exemplary HbB polynucleotide, which is available at NCBI Accession No. NM_000518, is provided below:

| (SEQ ID NO: 1) | |
|---|---|
| 1 | acatttgctt ctgacacaac tgtgttcact agcaacctca aacagacacc atggtgcatc |
| 61 | tgactcctga ggagaagtct gccgttactg ccctgtgggg caaggtgaac gtggatgaag |
| 121 | ttggtggtga ggccctgggc aggctgctgg tggtctaccc ttggacccag aggttctttg |
| 181 | agtcctttgg ggatctgtcc actcctgatg ctgttatggg Caacsccaag gtgaaggctc |
| 241 | atggcaagaa agtgctcggt gcctttagtg atggcctggc tcacctggac aacctcaagg |
| 301 | gcacctttgc cacactgagt gagctgcact gtgacaagct gcacgtggat cctgagaact |
| 361 | tcaggctcct gggcaacgtg ctggtctgtg tgctggccca tcactttggc aaagaattca |
| 421 | caccaccagt gcaggctgcc tatcagaaag tggtggctgg tgtggctaat gccctggccc |
| 481 | acaagtatca ctaagctcgc tttcttgctg tccaatttct attaaaggtt cctttgttcc |
| 541 | ctaagtccaa ctactaaact gggggatatt atgaagggcc ttgagcatct ggattctgcc |
| 601 | taataaaaaa catttatttt cattgcaa |

[0058] An exemplary hemoglobin subunit beta polypeptide sequence is provided below:

(SEQ ID NO: 2)
VHLTPEEKSAVTALWGKVNVDEVGGEALGRLLVVYPWTQRFFESEGDLS
TPDAVMGNPKVKAHGKKVLGAFSDGLAHLDNLKGTFATLSELHCDKLHV
DPENFRLLGNVLVCVLAHHFGKEFTPPVQAAYQKVVAGVANALAHKYH.

[0059] By “adenosine deaminase” is meant a polypeptide or fragment thereof capable of catalyzing the hydrolytic deamination of adenine or adenosine. In some embodiments, the deaminase or deaminase domain is an adenosine deaminase catalyzing the hydrolytic deamination of adenosine to inosine or deoxy adenosine to deoxyinosine. In some embodiments, the adenosine deaminase catalyzes the hydrolytic deamination of adenine or adenosine in deoxyribonucleic acid (DNA). The adenosine deaminases (e.g. engineered adenosine deaminases, evolved adenosine deaminases) provided herein may be from any organism, such as a bacterium.

[0060] By “Adenosine Deaminase Base Editor 8 (ABE8) polypeptide” or “ABE8” is meant a base editor as defined herein comprising an adenosine deaminase variant comprising an alteration at amino acid position 82 and/or 166 of the following reference sequence.

(SEQ ID NO: 3)
MSEVEFSHEYWMRHALTLAKRARDEREVPVGAVLVLNNRVIGEGWNRAI
GLHDPTAHAEIMALRQGGLVMQNYRLIDATLYVTFEPCVMCAGAMIHSR
IGRVVFGVRNAKTGAAGSLMDVLHYPGMNHRVEITEGILADECAALLCY
FFRMPRQVFNAQKKAQSSTD .

[0061] In some embodiments, ABE8 comprises further alterations, as described herein, relative to the reference sequence.

[0062] By “Adenosine Deaminase Base Editor 8 (ABE8) polynucleotide” is meant a polynucleotide encoding an ABE8.

[0063] “Administering” is referred to herein as providing one or more compositions described herein to a patient or a subject.

[0064] By “agent” is meant any small molecule chemical compound, antibody, nucleic acid molecule, or polypeptide, or fragments thereof.

[0065] By “alteration” is meant a change (increase or decrease) in the level, structure, or activity of an analyte, gene or polypeptide as detected by standard art known methods such as those described herein. As used herein, an alteration includes a 10% change in expression levels, a 25% change, a 40% change, and a 50% or greater change in expression levels. In some embodiments, an alteration includes an insertion, deletion, or substitution of a nucleobase or amino acid.

[0066] By “ameliorate” is meant decrease, suppress, attenuate, diminish, arrest, or stabilize the development or progression of a disease, such as a hemoglobinopathy, sickle cell disease, or thalassemia, which is an inherited blood disorder in which red blood cells contain less hemoglobin than normal, thus resulting in less oxygen being carried by the blood. Thalassemia can cause anemia.

[0067] By “analog” is meant a molecule that is not identical, but has analogous functional or structural features. For example, a polypeptide analog retains the biological activity of a corresponding naturally-occurring polypeptide, while having certain biochemical modifications that enhance the analog's function relative to a naturally occurring polypeptide. Such biochemical modifications could increase the analog's protease resistance, membrane permeability, or half-life, without altering, for example, ligand binding. An analog may include an unnatural amino acid.

[0068] By “base editor (BE),” or “nucleobase editor polypeptide (NBE)” is meant an agent that binds a polynucleotide and has nucleobase modifying activity. In various embodiments, the base editor comprises a nucleobase modifying polypeptide (e.g., a deaminase) and a polynucleotide programmable nucleotide binding domain (e.g., Cas9 or Cpf1) in conjunction with a guide polynucleotide (e.g., guide RNA (gRNA)). Representative nucleic acid and protein sequences of base editors are provided in the Sequence Listing as SEQ ID NOs: 4-13.

[0069] By “base editing activity” is meant acting to chemically alter a base within a polynucleotide. In one embodiment, a first base is converted to a second base. In one embodiment, the base editing activity is cytidine deaminase activity, e.g., converting target C⋅G to T⋅A. In another embodiment, the base editing activity is adenosine or adenine deaminase activity, e.g., converting A⋅T to G⋅C.

[0070] The term “base editor system” refers to an intermolecular complex for editing a nucleobase of a target nucleotide sequence. In various embodiments, the base editor (BE) system comprises (1) a polynucleotide programmable nucleotide binding domain, a deaminase domain (e.g., cytidine deaminase or adenosine deaminase) for deaminating nucleobases in the target nucleotide sequence; and (2) one or more guide polynucleotides (e.g., guide RNA) in conjunction with the polynucleotide programmable nucleotide binding domain. In various embodiments, the base editor (BE) system comprises a nucleobase editor domain selected from an adenosine deaminase or a cytidine deaminase, and a domain having nucleic acid sequence specific binding activity. In some embodiments, the base editor system comprises (1) a base editor (BE) comprising a polynucleotide programmable DNA binding domain and a deaminase domain for deaminating one or more nucleobases in a target nucleotide sequence; and (2) one or more guide RNAs in conjunction with the polynucleotide programmable DNA binding domain. In some embodiments, the polynucleotide programmable nucleotide binding domain is a polynucleotide programmable DNA binding domain. In some embodiments, the base editor is a cytidine base editor (CBE). In some embodiments, the base editor is an adenine or adenosine base editor (ABE). In some embodiments, the base editor is an adenine or adenosine base editor (ABE) or a cytidine base editor (CBE).

[0071] By “base editing activity” is meant acting to chemically alter a base within a polynucleotide. In one embodiment, a first base is converted to a second base. In one embodiment, the base editing activity is cytidine deaminase activity, e.g., converting target C⋅G to T⋅A. In another embodiment, the base editing activity is adenosine deaminase activity, e.g., converting A⋅T to G⋅C.

[0072] The term “Cas9” or “Cas9 domain” refers to an RNA guided nuclease comprising a Cas9 protein, or a fragment thereof (e.g., a protein comprising an active, inactive, or partially active DNA cleavage domain of Cas9, and/or the gRNA binding domain of Cas9). A Cas9 nuclease is also referred to sometimes as a casn1 nuclease or a CRISPR (clustered regularly interspaced short palindromic repeat) associated nuclease.

[0073] The term “conservative amino acid substitution” or “conservative mutation” refers to the replacement of one amino acid by another amino acid with a common property. A functional way to define common properties between individual amino acids is to analyze the normalized frequencies of amino acid changes between corresponding proteins of homologous organisms (Schulz, G. E. and Schirmer, R. H., Principles of Protein Structure, Springer-Verlag, New York (1979)). According to such analyses, groups of amino acids can be defined where amino acids within a group exchange preferentially with each other, and therefore resemble each other most in their impact on the overall protein structure (Schulz, G. E. and Schirmer, R. H., supra). Non-limiting examples of conservative mutations include amino acid substitutions of amino acids, for example, lysine for arginine and vice versa such that a positive charge can be maintained; glutamic acid for aspartic acid and vice versa such that a negative charge can be maintained; serine for threonine such that a free —OH can be maintained; and glutamine for asparagine such that a free —NH₂ can be maintained.

[0074] The term “coding sequence” or “protein coding sequence” as used interchangeably herein refers to a segment of a polynucleotide that codes for a protein. Coding sequences can also be referred to as open reading frames. The region or sequence is bounded nearer the 5′ end by a start codon and nearer the 3′ end with a stop codon. Stop codons useful with the base editors described herein include the following:

| | |
|---|---|
| Glutamine | CAG → TAG Stop codon |
| | CAA → TAA |
| Arginine | CGA → TGA |
| Tryptophan | TGG → TGA |
| | TGG → TAG |
| | TGG → TAA |

[0075] As used herein, the terms “condition” and “conditioning” refer to processes by which a patient is prepared for receipt of a transplant containing hematopoietic stem cells. Such procedures promote the engraftment of a hematopoietic stem cell transplant (for instance, as inferred from a sustained increase in the quantity of viable hematopoietic stem cells within a blood sample isolated from a patient following a conditioning procedure and subsequent hematopoietic stem cell transplantation). According to the methods described herein, a patient may be conditioned for hematopoietic stem cell transplant therapy by administration to the patient of an antibody or antigen-binding fragment thereof capable of binding an antigen expressed by hematopoietic stem cells, such as CD117, CXCR4, CD135, CD90, CD45, and/or CD34. Such antibodies are expected to act via complement-mediated cytotoxicity and antibody-dependent cell-mediated cytotoxicity. As described herein, the transplanted cells have been edited so that the antibody no longer binds the antigen (e.g., CD117, CXCR4, CD135, CD90, CD45, and/or CD34). Administration of an antibody, antigen-binding fragment thereof, drug-antibody conjugate, or chimeric antigen receptor expressing T-cell (CAR-T) capable of binding one or more antigens (e.g., CD117, CXCR4, CD135, CD90, CD45, CD34) to a patient in need of hematopoietic stem cell transplant therapy can promote the engraftment of a hematopoietic stem cell graft, for example, by selectively depleting endogenous hematopoietic stem cells, thereby creating a vacancy filled by an exogenous hematopoietic stem cell transplant.

[0076] By “cytidine deaminase” is meant a polypeptide or fragment thereof capable of catalyzing a deamination reaction that converts an amino group to a carbonyl group. In one embodiment, the cytidine deaminase converts cytosine to uracil or 5-methylcytosine to thymine. PmCDA1 (SEQ ID NO: 14 and 15), which is derived from Petromyzon marinus (Petromyzon marinus cytosine deaminase 1, “PmCDA1”), AID (Activation-induced cytidine deaminase; AICDA). Exemplary AID polypeptide sequences are provided in the Sequence Listing as SEQ ID NOs: 16-28 and 20-23, which are derived from a mammal (e.g., human, swine, bovine, horse, monkey etc.). Exemplary APOBEC cytidine deaminase polypeptide sequences are provided in the Sequence Listing as SEQ ID NOs: 24-64. Additional exemplary cytidine deaminase (CDA) sequences are provided in the Sequence Listing as SEQ ID NOs: 19 and 65-68. Other exemplary cytidine deaminse sequences, including APOBEC polypeptide sequences, are provided in the Sequence Listing as SEQ ID NOs: 291-413.

[0077] The term “deaminase” or “deaminase domain,” as used herein, refers to a protein or enzyme that catalyzes a deamination reaction.

[0078] “Detect” refers to identifying the presence, absence or amount of the analyte to be detected. In one embodiment, a sequence alteration in a polynucleotide or polypeptide is detected. In another embodiment, the presence of indels is detected.

[0079] By “detectable label” is meant a composition that when linked to a molecule of interest renders the latter detectable, via spectroscopic, photochemical, biochemical, immunochemical, or chemical means. For example, useful labels include radioactive isotopes, magnetic beads, metallic beads, colloidal particles, fluorescent dyes, electron-dense reagents, enzymes (for example, as commonly used in an enzyme linked immunosorbent assay (ELISA)), biotin, digoxigenin, or haptens.

[0080] By “disease” is meant any condition or disorder that damages or interferes with the normal function of a cell, tissue, or organ. Exemplary diseases include hemoglobinopathies (e.g., sickle cell disease).

[0081] By “effective amount” is meant the amount of an agent or active compound, e.g., a base editor as described herein, that is required to ameliorate the symptoms of a disease relative to an untreated patient or an individual without disease, i.e., a healthy individual, or is the amount of the agent or active compound sufficient to elicit a desired biological response. The effective amount of active compound(s) used to practice the present invention for therapeutic treatment of a disease varies depending upon the manner of administration, the age, body weight, and general health of the subject. Ultimately, the attending physician or veterinarian will decide the appropriate amount and dosage regimen. Such amount is referred to as an “effective” amount. In one embodiment, an effective amount is the amount of a base editor of the invention sufficient to introduce an alteration in a gene of interest in a cell (e.g., a cell in vitro or in vivo). In one embodiment, an effective amount is the amount of a base editor required to achieve a therapeutic effect. Such therapeutic effect need not be sufficient to alter a pathogenic gene in all cells of a subject, tissue or organ, but only to alter the pathogenic gene in about 1%, 5%, 10%, 25%, 50%, 75% or more of the cells present in a subject, tissue or organ. In one embodiment, an effective amount is sufficient to ameliorate one or more symptoms of a disease.

[0082] The term “exonuclease” refers to a protein or polypeptide capable of digesting a nucleic acid (e.g., RNA or DNA) from free ends.

[0083] The term “endonuclease” refers to a protein or polypeptide capable of catalyzing (e.g., cleaving) internal regions in a nucleic acid (e.g., DNA or RNA).

[0084] By “fragment” is meant a portion of a polypeptide or nucleic acid molecule. This portion contains, at least about 10%, 20%, 30%, 40%, 50%, 60%, 70%, 80%, or 90% of the entire length of the reference nucleic acid molecule or polypeptide. A fragment may contain 10, 20, 30, 40, 50, 60, 70, 80, 90, or 100, 200, 300, 400, 500, 600, 700, 800, 900, or 1000 nucleotides or amino acids.

[0085] By “guide RNA” or “gRNA” is meant a polynucleotide or polynucleotide complex which is specific for a target sequence and can form a complex with a polynucleotide programmable nucleotide binding domain protein (e.g., Cas9 or Cpf1). In an embodiment, the guide polynucleotide is a guide RNA (gRNA). gRNAs can exist as a complex of two or more RNAs, or as a single RNA molecule.

[0086] As used herein, the term “hematopoietic stem cells” (“HSCs”) refers to immature blood cells having the multipotential capacity to self-renew and to differentiate into mature blood cells containing diverse lineages, including, but not limited to, granulocytes (e.g., promyelocytes, neutrophils, eosinophils, basophils), erythrocytes (e.g., reticulocytes, erythrocytes), thrombocytes (e.g., megakaryoblasts, platelet producing megakaryocytes, platelets), monocytes (e.g., monocytes, macrophages), dendritic cells, microglia, osteoclasts, and lymphocytes (e.g., NK cells, B-cells and T-cells). Such cells may include CD34⁺ cells, which are immature cells (or HSCs) that express the CD34 cell surface marker. CD34 is a marker of human HSCs, and the colony-forming activity of human bone marrow (BM) cells is found in the CD34+ fraction. In humans, CD34⁺ cells are believed to include a subpopulation of cells with the stem cell properties defined above, whereas in mice, HSCs are CD34⁻. In an embodiment, transplantation studies using enriched CD34+BM cells indicated the presence of HSCs with long-term BM reconstitutional ability within this fraction. In addition, HSCs also refer to long term repopulating HSCs (LT-HSC) and short term repopulating HSCs (ST-HSC). LT-HSCs and ST-HSCs are differentiated, based on functional potential and on cell surface marker expression. For example, human HSCs are CD34⁺, CD38⁻, CD45RA⁻, CD90⁺, CD49F⁺, and lin⁻ (negative for mature lineage markers including CD2, CD3, CD4, CD7, CD8, CD10, CD11B, CD19, CD20, CD56, CD235A). In mice, bone marrow LT-HSCs are CD34⁻, SCA-1⁻, C-kit⁺, CD135⁻, Slamfl/CD150⁺, CD48⁻, and lin− (negative for mature lineage markers including Ter119, CD11b, Gr1, CD3, CD4, CD8, B220, IL7ra), whereas ST-HSCs are CD34⁺, SCA-1⁺, C-kit⁺, CD135⁻, Slamfl/CD150⁺, and lin⁻ (negative for mature lineage markers including Ter119, CD11b, Gr1, CD3, CD4, CD8, B220, IL7ra). In addition, ST-HSCs are less quiescent and more proliferative than LT-HSCs under homeostatic conditions. However, LT-HSC have greater self-renewal potential (i.e., they survive throughout adulthood, and can be serially transplanted through successive recipients), whereas ST-HSCs have limited self-renewal (i.e., they survive for only a limited period of time, and do not possess serial transplantation potential). Any of these HSCs can be used in the methods described herein. ST-HSCs are particularly useful because they are highly proliferative and thus, can more quickly give rise to differentiated progeny.

[0087] As used herein, the term “hematopoietic stem cell functional potential” refers to the functional properties of hematopoietic stem cells which include 1) multi-potency (which refers to the ability to differentiate into multiple different blood lineages including, but not limited to, granulocytes (e.g., promyelocytes, neutrophils, eosinophils, basophils), erythrocytes (e.g., reticulocytes, erythrocytes), thrombocytes (e.g., megakaryoblasts, platelet producing megakaryocytes, platelets), monocytes (e.g., monocytes, macrophages), dendritic cells, microglia, osteoclasts, and lymphocytes (e.g., NK cells, B-cells and T-cells); 2) self-renewal (which refers to the ability of hematopoietic stem cells to give rise to daughter cells that have equivalent potential as the mother cell, and further that this ability can repeatedly occur throughout the lifetime of an individual without exhaustion); and 3) the ability of hematopoietic stem cells or progeny thereof to be reintroduced into a transplant recipient whereupon they home to the hematopoietic stem cell niche and re-establish productive and sustained hematopoiesis.”

[0088] “Hybridization” means hydrogen bonding, which may be Watson-Crick, Hoogsteen or reversed Hoogsteen hydrogen bonding, between complementary nucleobases. For example, adenine and thymine are complementary nucleobases that pair through the formation of hydrogen bonds.

[0089] By “increases” is meant a positive alteration of at least 5%. 10%, 25%, 50%, 75%, or 100%. Percentages between these values are encompassed by the term.

[0090] The terms “inhibitor of base repair”, “base repair inhibitor”, “IBR” or their grammatical equivalents refer to a protein that is capable in inhibiting the activity of a nucleic acid repair enzyme, for example a base excision repair enzyme.

[0091] An “intein” is a fragment of a protein that is able to excise itself and join the remaining fragments (the exteins) with a peptide bond in a process known as protein splicing.

[0092] The terms “isolated,” “purified,” or “biologically pure” refer to material that is free to varying degrees from components which normally accompany it as found in its native state. “Isolate” denotes a degree of separation from original source or surroundings. “Purify” denotes a degree of separation that is higher than isolation. A “purified” or “biologically pure” protein is sufficiently free of other materials such that any impurities do not materially affect the biological properties of the protein or cause other adverse consequences. That is, a nucleic acid or peptide of this invention is purified if it is substantially free of cellular material, viral material, or culture medium when produced by recombinant DNA techniques, or chemical precursors or other chemicals when chemically synthesized. Purity and homogeneity are typically determined using analytical chemistry techniques, for example, polyacrylamide gel electrophoresis or high performance liquid chromatography. The term “purified” can denote that a nucleic acid or protein gives rise to essentially one band in an electrophoretic gel. For a protein that can be subjected to modifications, for example, phosphorylation or glycosylation, different modifications may give rise to different isolated proteins, which can be separately purified.

[0093] By “isolated polynucleotide” is meant a nucleic acid (e.g., a DNA) that is free of the genes which, in the naturally-occurring genome of the organism from which the nucleic acid molecule of the invention is derived, flank the gene. The term therefore includes, for example, a recombinant DNA that is incorporated into a vector; into an autonomously replicating plasmid or virus; or into the genomic DNA of a prokaryote or eukaryote; or that exists as a separate molecule (for example, a cDNA or a genomic or cDNA fragment produced by PCR or restriction endonuclease digestion) independent of other sequences. In addition, the term includes an RNA molecule that is transcribed from a DNA molecule, as well as a recombinant DNA that is part of a hybrid gene encoding additional polypeptide sequence.

[0094] By an “isolated polypeptide” is meant a polypeptide of the invention that has been separated from components that naturally accompany it. Typically, the polypeptide is isolated when it is at least 60%, by weight, free from the proteins and naturally-occurring organic molecules with which it is naturally associated. Preferably, the preparation is at least 75%, more preferably at least 90%, and most preferably at least 99%, by weight, a polypeptide of the invention. An isolated polypeptide of the invention may be obtained, for example, by extraction from a natural source, by expression of a recombinant nucleic acid encoding such a polypeptide; or by chemically synthesizing the protein. Purity can be measured by any appropriate method, for example, column chromatography, polyacrylamide gel electrophoresis, or by HPLC analysis.

[0095] By “CD117 (C-kit; SCFR) polypeptide” is meant a polypeptide or fragment thereof having at least about 95% amino acid sequence identity to an amino acid sequence provided at GenBank Accession No. NP_000213 that binds an anti-CD117 antibody. In some embodiments, an CD117 polypeptide or fragment thereof has SCF signaling activity. An exemplary CD117 polypeptide sequence follows:

>NP_000213.1 mast/stem cell growth factor receptor Kit isoform 1
precursor [Homo sapiens]
(SEQ ID NO: 69)
MRGARGAWDFLCVLLLLLRVQTGSSQPSVSPGEPSPPSIHPGKSDLIVRVGDEIRLLCTDP
GFVKWTFEILDETNENKQNEWITEKAEATNTGKYTCTNKHGLSNSIYVFVRDPAKLFLV
DRSLYGKEDNDTLYRCPLTDPEYTNYSLKGCQGKPLPKDLRFIPDPKAGIMIKSVKRAY
HRLCLHCSVDQEGKSVLSEKFILKVRPAFKAVPVVSVSKASYLLREGEEFTVTCTIKDVS
SSVYSTWKRENSQTKLQEKYNSWHHGDFNYERQATLTISSARVNDSGVFMCYANNTFG
SANVTTTLEVVDKGFINIFPMINTTVFVNDGENVDLIVEYEAFPKPEHQQWIYMNRTFTD
KWEDYPKSENESNIRYVSELHLTRLKGTEGGTYTFLVSNSDVNAAIAFNVYVNTKPEILT
YDRLVNGMLQCVAAGFPEPTIDWYFCPGTEQRCSASVLPVDVQTLNSSGPPFGKLVVQS
SIDSSAFKHNGTVECKAYNDVGKTSAYFNFAFKGNNKEQIHPHTLFTPLLIGFVIVAGM
MCIIVMILTYKYLQKPMYEVQWKVVEEINGNNYVYIDPTQLPYDHKWEFPRNRLSFGK
TLGAGAFGKVVEATAYGLIKSDAAMTVAVKMLKPSAHLTEREALMSELKVLSYLGNH
MNIVNLLGACTIGGPTLVITEYCCYGDLLNFLRRKRDSFICSKQEDHAEAALYKNLLHSK
ESSCSDSTNEYMDMKPGVSYVVPTKADKRRSVRIGSYIERDVTPAIMEDDELALDLEDL
LSFSYQVAKGMAFLASKNCIHRDLAARNILLTHGRITKICDFGLARDIKNDSNYVVKGN
ARLPVKWMAPESIFNCVYTFESDVWSYGIFLWELFSLGSSPYPGMPVDSKFYKMIKEGE
RMLSPEHAPAEMYDIMKTCWDADPLKRPTFKQIVQLIEKQISESTNHIYSNLANCSPNRQ
KPVVDHSVRINSVGSTASSSQPLLVHDDV.

[0096] By “CD117 polynucleotide” is meant a nucleic acid molecule that encodes a CD117 polypeptide. An exemplary CD117 polynucleotide sequence follows:

>NM_000222.2 Homo sapiens KIT proto-oncogene, receptor tyrosine kinase
(KIT), transcript variant 1, mRNA
(SEQ ID NO: 70)
TCTGGGGGCTCGGCTTTGCCGCGCTCGCTGCACTTGGGCGAGAGCTGGAACGTGGAC
CAGAGCTCGGATCCCATCGCAGCTACCGCGATGAGAGGCGCTCGCGGCGCCTGGGA
TTTTCTCTGCGTTCTGCTCCTACTGCTTCGCGTCCAGACAGGCTCTTCTCAACCATCT
GTGAGTCCAGGGGAACCGTCTCCACCATCCATCCATCCAGGAAAATCAGACTTAAT
AGTCCGCGTGGGCGACGAGATTAGGCTGTTATGCACTGATCCGGGCTTTGTCAAATG
GACTTTTGAGATCCTGGATGAAACGAATGAGAATAAGCAGAATGAATGGATCACGG
AAAAGGCAGAAGCCACCAACACCGGCAAATACACGTGCACCAACAAACACGGCTT
AAGCAATTCCATTTATGTGTTTGTTAGAGATCCTGCCAAGCTTTTCCTTGTTGACCGC
TCCTTGTATGGGAAAGAAGACAACGACACGCTGGTCCGCTGTCCTCTCACAGACCCA
GAAGTGACCAATTATTCCCTCAAGGGGTGCCAGGGGAAGCCTCTTCCCAAGGACTT
GAGGTTTATTCCTGACCCCAAGGCGGGCATCATGATCAAAAGTGTGAAACGCGCCT
ACCATCGGCTCTGTCTGCATTGTTCTGTGGACCAGGAGGGCAAGTCAGTGCTGTCGG
AAAAATTCATCCTGAAAGTGAGGCCAGCCTTCAAAGCTGTGCCTGTTGTGTCTGTGT
CCAAAGCAAGCTATCTTCTTAGGGAAGGGGAAGAATTCACAGTGACGTGCACAATA
AAAGATGTGTCTAGTTCTGTGTACTCAACGTGGAAAAGAGAAAACAGTCAGACTAA
ACTACAGGAGAAATATAATAGCTGGCATCACGGTGACTTCAATTATGAACGTCAGG
CAACGTTGACTATCAGTTCAGCGAGAGTTAATGATTCTGGAGTGTTCATGTGTTATG
CCAATAATACTTTTGGATCAGCAAATGTCACAACAACCTTGGAAGTAGTAGATAAA
GGATTCATTAATATCTTCCCCATGATAAACACTACAGTATTTGTAAACGATGGAGAA
AATGTAGATTTGATTGTTGAATATGAAGCATTCCCCAAACCTGAACACCAGCAGTGG
ATCTATATGAACAGAACCTTCACTGATAAATGGGAAGATTATCCCAAGTCTGAGAAT
GAAAGTAATATCAGATACGTAAGTGAACTTCATCTAACGAGATTAAAAGGCACCGA
AGGAGGCACTTACACATTCCTAGTGTCCAATTCTGACGTCAATGCTGCCATAGCATT
TAATGTTTATGTGAATACAAAACCAGAAATCCTGACTTACGACAGGCTCGTGAATGG
CATGCTCCAATGTGTGGCAGCAGGATTCCCAGAGCCCACAATAGATTGGTATTTTTG
TCCAGGAACTGAGCAGAGATGCTCTGCTTCTGTACTGCCAGTGGATGTGCAGACACT
AAACTCATCTGGGCCACCGTTTGGAAAGCTAGTGGTTCAGAGTTCTATAGATTCTAG
TGCATTCAAGCACAATGGCACGGTTGAATGTAAGGCTTACAACGATGTGGGCAAGA
CTTCTGCCTATTTTAACTTTGCATTTAAAGGTAACAACAAAGAGCAAATCCATCCCC
ACACCCTGTTCACTCCTTTGCTGATTGGTTTCGTAATCGTAGCTGGCATGATGTGCAT
TATTGTGATGATTCTGACCTACAAATATTTACAGAAACCCATGTATGAAGTACAGTG
GAAGGTTGTTGAGGAGATAAATGGAAACAATTATGTTTACATAGACCCAACACAAC
TTCCTTATGATCACAAATGGGAGTTTCCCAGAAACAGGCTGAGTTTTGGGAAAACCC
TGGGTGCTGGAGCTTTCGGGAAGGTTGTTGAGGCAACTGCTTATGGCTTAATTAAGT
CAGATGCGGCCATGACTGTCGCTGTAAAGATGCTCAAGCCGAGTGCCCATTTGACA
GAACGGGAAGCCCTCATGTCTGAACTCAAAGTCCTGAGTTACCTTGGTAATCACATG
AATATTGTGAATCTACTTGGAGCCTGCACCATTGGAGGGCCCACCCTGGTCATTACA
GAATATTGTTGCTATGGTGATCTTTTGAATTTTTTGAGAAGAAAACGTGATTCATTTA
TTTGTTCAAAGCAGGAAGATCATGCAGAAGCTGCACTTTATAAGAATCTTCTGCATT
CAAAGGAGTCTTCCTGCAGCGATAGTACTAATGAGTACATGGACATGAAACCTGGA
GTTTCTTATGTTGTCCCAACCAAGGCCGACAAAAGGAGATCTGTGAGAATAGGCTCA
TACATAGAAAGAGATGTGACTCCCGCCATCATGGAGGATGACGAGTTGGCCCTAGA
CTTAGAAGACTTGCTGAGCTTTTCTTACCAGGTGGCAAAGGGCATGGCTTTCCTCGC
CTCCAAGAATTGTATTCACAGAGACTTGGCAGCCAGAAATATCCTCCTTACTCATGG
TCGGATCACAAAGATTTGTGATTTTGGTCTAGCCAGAGACATCAAGAATGATTCTAA
TTATGTGGTTAAAGGAAACGCTCGACTACCTGTGAAGTGGATGGCACCTGAAAGCA
TTTTCAACTGTGTATACACGTTTGAAAGTGACGTCTGGTCCTATGGGATTTTTCTTTG
GGAGCTGTTCTCTTTAGGAAGCAGCCCCTATCCTGGAATGCCGGTCGATTCTAAGTT
CTACAAGATGATCAAGGAAGGCTTCCGGATGCTCAGCCCTGAACACGCACCTGCTG
AAATGTATGACATAATGAAGACTTGCTGGGATGCAGATCCCCTAAAAAGACCAACA
TTCAAGCAAATTGTTCAGCTAATTGAGAAGCAGATTTCAGAGAGCACCAATCATATT
TACTCCAACTTAGCAAACTGCAGCCCCAACCGACAGAAGCCCGTGGTAGACCATTCT
GTGCGGATCAATTCTGTCGGCAGCACCGCTTCCTCCTCCCAGCCTCTGCTTGTGCAC
GACGATGTCTGAGCAGAATCAGTGTTTGGGTCACCCCTCCAGGAATGATCTCTTCTT
TTGGCTTCCATGATGGTTATTTTCTTTTCTTTCAACTTGCATCCAACTCCAGGATAGT
GGGCACCCCACTGCAATCCTGTCTTTCTGAGCACACTTTAGTGGCCGATGATTTTTGT
CATCAGCCACCATCCTATTGCAAAGGTTCCAACTGTATATATTCCCAATAGCAACGT
AGCTTCTACCATGAACAGAAAACATTCTGATTTGGAAAAAGAGAGGGAGGTATGGA
CTGGGGGCCAGAGTCCTTTCCAAGGCTTCTCCAATTCTGCCCAAAAATATGGTTGAT
AGTTTACCTGAATAAATGGTAGTAATCACAGTTGGCCTTCAGAACCATCCATAGTAG
TATGATGATACAAGATTAGAAGCTGAAAACCTAAGTCCTTTATGTGGAAAACAGAA
CATCATTAGAACAAAGGACAGAGTATGAACACCTGGGCTTAAGAAATCTAGTATTT
CATGCTGGGAATGAGACATAGGCCATGAAAAAAATGATCCCCAAGTGTGAACAAAA
GATGCTCTTCTGTGGACCACTGCATGAGCTTTTATACTACCGACCTGGTTTTTAAATA
GAGTTTGCTATTAGAGCATTGAATTGGAGAGAAGGCCTCCCTAGCCAGCACTTGTAT
ATACGCATCTATAAATTGTCCGTGTTCATACATTTGAGGGGAAAACACCATAAGGTT
TCGTTTCTGTATACAACCCTGGCATTATGTCCACTGTGTATAGAAGTAGATTAAGAG
CCATATAAGTTTGAAGGAAACAGTTAATACCATTTTTTAAGGAAACAATATAACCAC
AAAGCACAGTTTGAACAAAATCTCCTCTTTTAGCTGATGAACTTATTCTGTAGATTCT
GTGGAACAAGCCTATCAGCTTCAGAATGGCATTGTACTCAATGGATTTGATGCTGTT
TGACAAAGTTACTGATTCACTGCATGGCTCCCACAGGAGTGGGAAAACACTGCCAT
CTTAGTTTGGATTCTTATGTAGCAGGAAATAAAGTATAGGTTTAGCCTCCTTCGCAG
GCATGTCCTGGACACCGGGCCAGTATCTATATATGTGTATGTACGTTTGTATGTGTG
TAGACAAATATTTGGAGGGGTATTTTTGCCCTGAGTCCAAGAGGGTCCTTTAGTACC
TGAAAAGTAACTTGGCTTTCATTATTAGTACTGCTCTTGTTTCTTTTCACATAGCTGT
CTAGAGTAGCTTACCAGAAGCTTCCATAGTGGTGCAGAGGAAGTGGAAGGCATCAG
TCCCTATGTATTTGCAGTTCACCTGCACTTAAGGCACTCTGTTATTTAGACTCATCTT
ACTGTACCTGTTCCTTAGACCTTCCATAATGCTACTGTCTCACTGAAACATTTAAATT
TTACCCTTTAGACTGTAGCCTGGATATTATTCTTGTAGTTTACCTCTTTAAAAACAAA
ACAAAACAAAACAAAAAACTCCCCTTCCTCACTGCCCAATATAAAAGGCAAATGTG
TACATGGCAGAGTTTGTGTGTTGTCTTGAAAGATTCAGGTATGTTGCCTTTATGGTTT
CCCCCTTCTACATTTCTTAGACTACATTTAGAGAACTGTGGCCGTTATCTGGAAGTA
ACCATTTGCACTGGAGTTCTATGCTCTCGCACCTTTCCAAAGTTAACAGATTTTGGG
GTTGTGTTGTCACCCAAGAGATTGTTGTTTGCCATACTTTGTCTGAAAAATTCCTTTG
TGTTTCTATTGACTTCAATGATAGTAAGAAAAGTGGTTGTTAGTTATAGATGTCTAG
GTACTTCAGGGGCACTTCATTGAGAGTTTTGTCTTGGATATTCTTGAAAGTTTATATT
TTTATAATTTTTTCTTACATCAGATGTTTCTTTGCAGTGGCTTAATGTTTGAAATTATT
TTGTGGCTTTTTTTGTAAATATTGAAATGTAGCAATAATGTCTTTTGAATATTCCCAA
GCCCATGAGTCCTTGAAAATATTTTTTATATATACAGTAACTTTATGTGTAAATACAT
AAGCGGCGTAAGTTTAAAGGATGTTGGTGTTCCACGTGTTTTATTCCTGTATGTTGTC
CAATTGTTGACAGTTCTGAAGAATTCTAATAAAATGTACATATATAAATCAAAAAAA
AAAAAAAAA

[0097] By “C—X—C chemokine receptor type 4 (CXCR4) polypeptide” is meant a polypeptide or fragment thereof having at least about 95% amino acid sequence identity to an amino acid sequence provided at GenBank Accession NP_001008540 that binds an anti-CXCR4 antibody. An exemplary CXCR4 polypeptide sequence follows:

>NP_001008540.1 C-X-C chemokine receptor type 4 isoform a
[Homo sapiens]
(SEQ ID NO: 71)
MSIPLPLLQIYTSDNYTEEMGSGDYDSMKEPCFREENANFNKIFLPTIYSIIFLTGIVGNGL
VILVMGYQKKLRSMTDKYRLHLSVADLLFVITLPFWAVDAVANWYFGNFLCKAVHVI
YTVNLYSSVLILAFISLDRYLAIVHATNSQRPRKLLAEKVVYVGVWIPALLLTIPDFIFAN
VSEADDRYICDRFYPNDLWVVVFQFQHIMVGLILPGIVILSCYCIIISKLSHSKGHQKRKA
LKTTVILILAFFACWLPYYIGISIDSFILLEIIKQGCEFENTVHKWISITEALAFFHCCLNPIL
YAFLGAKFKTSAQHALTSVSRGSSLKILSKGKRGGHSSVSTESESSSFHSS.

[0098] By “CXCR4 polynucleotide” is meant a nucleic acid molecule that encodes a CXCR4 polypeptide. An exemplary CXCR4 polynucleotide sequence follows:

>NM_003467.2 Homo sapiens C-X-C motif chemokine receptor 4 (CXCR4),
transcript variant 2, mRNA
(SEQ ID NO: 72)
AACTTCAGTTTGTTGGCTGCGGCAGCAGGTAGCAAAGTGACGCCGAGGGCCTGAGT
GCTCCAGTAGCCACCGCATCTGGAGAACCAGCGGTTACCATGGAGGGGATCAGTAT
ATACACTTCAGATAACTACACCGAGGAAATGGGCTCAGGGGACTATGACTCCATGA
AGGAACCCTGTTTCCGTGAAGAAAATGCTAATTTCAATAAAATCTTCCTGCCCACCA
TCTACTCCATCATCTTCTTAACTGGCATTGTGGGCAATGGATTGGTCATCCTGGTCAT
GGGTTACCAGAAGAAACTGAGAAGCATGACGGACAAGTACAGGCTGCACCTGTCAG
TGGCCGACCTCCTCTTTGTCATCACGCTTCCCTTCTGGGCAGTTGATGCCGTGGCAAA
CTGGTACTTTGGGAACTTCCTATGCAAGGCAGTCCATGTCATCTACACAGTCAACCT
CTACAGCAGTGTCCTCATCCTGGCCTTCATCAGTCTGGACCGCTACCTGGCCATCGT
CCACGCCACCAACAGTCAGAGGCCAAGGAAGCTGTTGGCTGAAAAGGTGGTCTATG
TTGGCGTCTGGATCCCTGCCCTCCTGCTGACTATTCCCGACTTCATCTTTGCCAACGT
CAGTGAGGCAGATGACAGATATATCTGTGACCGCTTCTACCCCAATGACTTGTGGGT
GGTTGTGTTCCAGTTTCAGCACATCATGGTTGGCCTTATCCTGCCTGGTATTGTCATC
CTGTCCTGCTATTGCATTATCATCTCCAAGCTGTCACACTCCAAGGGCCACCAGAAG
CGCAAGGCCCTCAAGACCACAGTCATCCTCATCCTGGCTTTCTTCGCCTGTTGGCTG
CCTTACTACATTGGGATCAGCATCGACTCCTTCATCCTCCTGGAAATCATCAAGCAA
GGGTGTGAGTTTGAGAACACTGTGCACAAGTGGATTTCCATCACCGAGGCCCTAGCT
TTCTTCCACTGTTGTCTGAACCCCATCCTCTATGCTTTCCTTGGAGCCAAATTTAAAA
CCTCTGCCCAGCACGCACTCACCTCTGTGAGCAGAGGGTCCAGCCTCAAGATCCTCT
CCAAAGGAAAGCGAGGTGGACATTCATCTGTTTCCACTGAGTCTGAGTCTTCAAGTT
TTCACTCCAGCTAACACAGATGTAAAAGACTTTTTTTTATACGATAAATAACTTTTTT
TTAAGTTACACATTTTTCAGATATAAAAGACTGACCAATATTGTACAGTTTTTATTGC
TTGTTGGATTTTTGTCTTGTGTTTCTTTAGTTTTTGTGAAGTTTAATTGACTTATTTAT
ATAAATTTTTTTTGTTTCATATTGATGTGTGTCTAGGCAGGACCTGTGGCCAAGTTCT
TAGTTGCTGTATGTCTCGTGGTAGGACTGTAGAAAAGGGAACTGAACATTCCAGAG
CGTGTAGTGAATCACGTAAAGCTAGAAATGATCCCCAGCTGTTTATGCATAGATAAT
CTCTCCATTCCCGTGGAACGTTTTTCCTGTTCTTAAGACGTGATTTTGCTGTAGAAGA
TGGCACTTATAACCAAAGCCCAAAGTGGTATAGAAATGCTGGTTTTTCAGTTTTCAG
GAGTGGGTTGATTTCAGCACCTACAGTGTACAGTCTTGTATTAAGTTGTTAATAAAA
GTACATGTTAAACTTAAAAAAAAAAAAAAAAAA.

[0099] By “CD135 polypeptide” is meant a polypeptide or fragment thereof having at least about 95% amino acid sequence identity to an amino acid sequence provided at GenBank Accession No. NP_004110 that binds an anti-CD135 antibody. An exemplary CD135 polypeptide sequence follows:

>NP_004110.2 receptor-type tyrosine-protein kinase FLT3 precursor
[Homo sapiens]
(SEQ ID NO: 73)
MPALARDGGQLPLLVVFSAMIFGTITNQDIPVIKCVLINHKNNDSSVGKSSSYPMVSESP
EDLGCALRPQSSGTVYEAAAVEVDVSASITLQVLVDAPGNISCLWVFKHSSLNCQPHFD
LQNRGVVSMVILKMTETQAGEYLLFIQSEATNYTILFTVSIRNTLLYTLRRPYFRKMENQ
DALVCISESVPEPIVEWVLCDSQGESCKEESPAVVKKEEKVLHELFGTDIRCCARNELGR
ECTRLFTIDLNQTPQTTLPQLFLKVGEPLWIRCKAVHVNHGFGLTWELENKALEEGNYF
EMSTYSTNRTMIRILFAFVSSVARNDTGYYTCSSSKHPSQSALVTIVEKGFINATNSSEDY
EIDQYEEFCFSVRFKAYPQIRCTWTFSRKSFPCEQKGLDNGYSISKFCNHKHQPGEYIFHA
ENDDAQFTKMFTLNIRRKPQVLAEASASQASCFSDGYPLPSWTWKKCSDKSPNCTEEIT
EGVWNRKANRKVFGQWVSSSTLNMSEAKKGFLVKCCAYNSLGTSCETILLNSPGPFPFIQ
DNISFYATIGVCLLFIVVLTLLICHKYKKQFRYESQLQMVQVTGSSDNEYFYVDFREYEY
DLKWEFPRENLEFGKVLGSGAFGKVMNATAYGISKTGVSIQVAVKMLKEKADSSEREA
LMSELKMMTQLGSHENIVNLLGACTLSGPIYLIFEYCCYGDLLNYLRSKREKFHRTWTEI
FKEHNFSFYPTFQSHPNSSMPGSREVQIHPDSDQISGLHGNSFHSEDEIEYENQKRLEEEE
DLNVLTFEDLLCFAYQVAKGMEFLEFKSCVHRDLAARNVLVTHGKVVKICDFGLARDI
MSDSNYVVRGNARLPVKWMAPESLFEGIYTIKSDVWSYGILLWEIFSLGVNPYPGIPVD
ANFYKLIQNGFKMDQPFYATEEIYIIMQSCWAFDSRKRPSFPNLTSFLGCQLADAEEAM
YQNVDGRVSECPHTYQNRRPFSREMDLGLLSPQAQVEDS.

[0100] By “CD135 polynucleotide” is meant a nucleic acid molecule that encodes a CD135 polypeptide. An exemplary CD135 polynucleotide sequence follows:

>NM_004119.2 Homo sapiens fms related tyrosine kinase 3 (FLT3),
transcript variant 1, mRNA
(SEQ ID NO: 74)
ACCTGCAGCGCGAGGCGCGCCGCTCCAGGCGGCATCGCAGGGCTGGGCCGGCGCGG
CCTGGGGACCCCGGGCTCCGGAGGCCATGCCGGCGTTGGCGCGCGACGGCGGCCAG
CTGCCGCTGCTCGTTGTTTTTTCTGCAATGATATTTGGGACTATTACAAATCAAGATC
TGCCTGTGATCAAGTGTGTTTTAATCAATCATAAGAACAATGATTCATCAGTGGGGA
AGTCATCATCATATCCCATGGTATCAGAATCCCCGGAAGACCTCGGGTGTGCGTTGA
GACCCCAGAGCTCAGGGACAGTGTACGAAGCTGCCGCTGTGGAAGTGGATGTATCT
GCTTCCATCACACTGCAAGTGCTGGTCGACGCCCCAGGGAACATTTCCTGTCTCTGG
GTCTTTAAGCACAGCTCCCTGAATTGCCAGCCACATTTTGATTTACAAAACAGAGGA
GTTGTTTCCATGGTCATTTTGAAAATGACAGAAACCCAAGCTGGAGAATACCTACTT
TTTATTCAGAGTGAAGCTACCAATTACACAATATTGTTTACAGTGAGTATAAGAAAT
ACCCTGCTTTACACATTAAGAAGACCTTACTTTAGAAAAATGGAAAACCAGGACGC
CCTGGTCTGCATATCTGAGAGCGTTCCAGAGCCGATCGTGGAATGGGTGCTTTGCGA
TTCACAGGGGGAAAGCTGTAAAGAAGAAAGTCCAGCTGTTGTTAAAAAGGAGGAA
AAAGTGCTTCATGAATTATTTGGGACGGACATAAGGTGCTGTGCCAGAAATGAACT
GGGCAGGGAATGCACCAGGCTGTTCACAATAGATCTAAATCAAACTCCTCAGACCA
CATTGCCACAATTATTTCTTAAAGTAGGGGAACCCTTATGGATAAGGTGCAAAGCTG
TTCATGTGAACCATGGATTCGGGCTCACCTGGGAATTAGAAAACAAAGCACTCGAG
GAGGGCAACTACTTTGAGATGAGTACCTATTCAACAAACAGAACTATGATACGGAT
TCTGTTTGCTTTTGTATCATCAGTGGCAAGAAACGACACCGGATACTACACTTGTTC
CTCTTCAAAGCATCCCAGTCAATCAGCTTTGGTTACCATCGTAGAAAAGGGATTTAT
AAATGCTACCAATTCAAGTGAAGATTATGAAATTGACCAATATGAAGAGTTTTGTTT
TTCTGTCAGGTTTAAAGCCTACCCACAAATCAGATGTACGTGGACCTTCTCTCGAAA
ATCATTTCCTTGTGAGCAAAAGGGTCTTGATAACGGATACAGCATATCCAAGTTTTG
CAATCATAAGCACCAGCCAGGAGAATATATATTCCATGCAGAAAATGATGATGCCC
AATTTACCAAAATGTTCACGCTGAATATAAGAAGGAAACCTCAAGTGCTCGCAGAA
GCATCGGCAAGTCAGGCGTCCTGTTTCTCGGATGGATACCCATTACCATCTTGGACC
TGGAAGAAGTGTTCAGACAAGTCTCCCAACTGCACAGAAGAGATCACAGAAGGAGT
CTGGAATAGAAAGGCTAACAGAAAAGTGTTTGGACAGTGGGTGTCGAGCAGTACTC
TAAACATGAGTGAAGCCATAAAAGGGTTCCTGGTCAAGTGCTGTGCATACAATTCCC
TTGGCACATCTTGTGAGACGATCCTTTTAAACTCTCCAGGCCCCTTCCCTTTCATCCA
AGACAACATCTCATTCTATGCAACAATTGGTGTTTGTCTCCTCTTCATTGTCGTTTTA
ACCCTGCTAATTTGTCACAAGTACAAAAAGCAATTTAGGTATGAAAGCCAGCTACA
GATGGTACAGGTGACCGGCTCCTCAGATAATGAGTACTTCTACGTTGATTTCAGAGA
ATATGAATATGATCTCAAATGGGAGTTTCCAAGAGAAAATTTAGAGTTTGGGAAGG
TACTAGGATCAGGTGCTTTTGGAAAAGTGATGAACGCAACAGCTTATGGAATTAGC
AAAACAGGAGTCTCAATCCAGGTTGCCGTCAAAATGCTGAAAGAAAAAGCAGACAG
CTCTGAAAGAGAGGCACTCATGTCAGAACTCAAGATGATGACCCAGCTGGGAAGCC
ACGAGAATATTGTGAACCTGCTGGGGGCGTGCACACTGTCAGGACCAATTTACTTGA
TTTTTGAATACTGTTGCTATGGTGATCTTCTCAACTATCTAAGAAGTAAAAGAGAAA
AATTTCACAGGACTTGGACAGAGATTTTCAAGGAACACAATTTCAGTTTTTACCCCA
CTTTCCAATCACATCCAAATTCCAGCATGCCTGGTTCAAGAGAAGTTCAGATACACC
CGGACTCGGATCAAATCTCAGGGCTTCATGGGAATTCATTTCACTCTGAAGATGAAA
TTGAATATGAAAACCAAAAAAGGCTGGAAGAAGAGGAGGACTTGAATGTGCTTACA
TTTGAAGATCTTCTTTGCTTTGCATATCAAGTTGCCAAAGGAATGGAATTTCTGGAA
TTTAAGTCGTGTGTTCACAGAGACCTGGCCGCCAGGAACGTGCTTGTCACCCACGGG
AAAGTGGTGAAGATATGTGACTTTGGATTGGCTCGAGATATCATGAGTGATTCCAAC
TATGTTGTCAGGGGCAATGCCCGTCTGCCTGTAAAATGGATGGCCCCCGAAAGCCTG
TTTGAAGGCATCTACACCATTAAGAGTGATGTCTGGTCATATGGAATATTACTGTGG
GAAATCTTCTCACTTGGTGTGAATCCTTACCCTGGCATTCCGGTTGATGCTAACTTCT
ACAAACTGATTCAAAATGGATTTAAAATGGATCAGCCATTTTATGCTACAGAAGAA
ATATACATTATAATGCAATCCTGCTGGGCTTTTGACTCAAGGAAACGGCCATCCTTC
CCTAATTTGACTTCGTTTTTAGGATGTCAGCTGGCAGATGCAGAAGAAGCGATGTAT
CAGAATGTGGATGGCCGTGTTTCGGAATGTCCTCACACCTACCAAAACAGGCGACCT
TTCAGCAGAGAGATGGATTTGGGGCTACTCTCTCCGCAGGCTCAGGTCGAAGATTCG
TAGAGGAACAATTTAGTTTTAAGGACTTCATCCCTCCACCTATCCCTAACAGGCTGT
AGATTACCAAAACAAGATTAATTTCATCACTAAAAGAAAATCTATTATCAACTGCTG
CTTCACCAGACTTTTCTCTAGAAGCTGTCTGCGTTTACTCTTGTTTTCAAAGGGACTT
TTGTAAAATCAAATCATCCTGTCACAAGGCAGGAGGAGCTGATAATGAACTTTATTG
GAGCATTGATCTGCATCCAAGGCCTTCTCAGGCTGGCTTGAGTGAATTGTGTACCTG
AAGTACAGTATATTCTTGTAAATACATAAAACAAAAGCATTTTGCTAAGGAGAAGC
TAATATGATTTTTTAAGTCTATGTTTTAAAATAATATGTAAATTTTTCAGCTATTTAG
TGATATATTTTATGGGTGGGAATAAAATTTCTACTACAGAATTGCCCATTATTGAAT
TATTTACATGGTATAATTAGGGCAAGTCTTAACTGGAGTTCACGAACCCCCTGAAAT
TGTGCACCCATAGCCACCTACACATTCCTTCCAGAGCACGTGTGCTTTTACCCCAAG
ATACAAGGAATGTGTAGGCAGCTATGGTTGTCACAGCCTAAGATTTCTGCAACAAC
AGGGGTTGTATTGGGGGAAGTTTATAATGAATAGGTGTTCTACCATAAAGAGTAAT
ACATCACCTAGACACTTTGGCGGCCTTCCCAGACTCAGGGCCAGTCAGAAGTAACAT
GGAGGATTAGTATTTTCAATAAAGTTACTCTTGTCCCCACAAAAAAA.

[0101] By “CD90 polypeptide” is meant a polypeptide or fragment thereof having at least about 95% amino acid sequence identity to an amino acid sequence provided at GenBank Accession No. NP_001298089 that binds an anti-CD90 antibody. An exemplary CD90 polypeptide sequence follows:

>NP_001298089.1 thy-1 membrane glycoprotein isoform 1 preproprotein
[Homo sapiens]
(SEQ ID NO: 75)
MNLAISIALLLTVLQVSRGQKVTSLTACLVDQSLRLDCRHENTSSSPIQYEFSLTRETKKH
VLFGTVGVPEHTYRSRTNFTSKYNMKVLYLSAFTSKDEGTYTCALHHSGHSPPISSQNV
TVLRDKLVKCEGISLLAQNTSWLLLLLLSLSLLQATDFMSL.

[0102] By “CD90 polynucleotide” is meant a nucleic acid molecule that encodes a CD90 polypeptide. An exemplary CD90 polynucleotide sequence follows:

>NM_006288.5 Homo sapiens Thy-1 cell surface antigen (THY1),
transcript variant 1, mRNA
(SEQ ID NO: 76)
AGCAACCGGAGGCGGCGGCGCGTCTGGAGGAGGCTGCAGCAGCGGAAGACCCCAG
TCCAGATCCAGGACTGAGATCCCAGAACCATGAACCTGGCCATCAGCATCGCTCTCC
TGCTAACAGTCTTGCAGGTCTCCCGAGGGCAGAAGGTGACCAGCCTAACGGCCTGC
CTAGTGGACCAGAGCCTTCGTCTGGACTGCCGCCATGAGAATACCAGCAGTTCACCC
ATCCAGTACGAGTTCAGCCTGACCCGTGAGACAAAGAAGCACGTGCTCTTTGGCACT
GTGGGGGTGCCTGAGCACACATACCGCTCCCGAACCAACTTCACCAGCAAATACAA
CATGAAGGTCCTCTACTTATCCGCCTTCACTAGCAAGGACGAGGGCACCTACACGTG
TGCACTCCACCACTCTGGCCATTCCCCACCCATCTCCTCCCAGAACGTCACAGTGCT
CAGAGACAAACTGGTCAAGTGTGAGGGCATCAGCCTGCTGGCTCAGAACACCTCGT
GGCTGCTGCTGCTCCTGCTCTCCCTCTCCCTCCTCCAGGCCACGGATTTCATGTCCCT
GTGACTGGTGGGGCCCATGGAGGAGACAGGAAGCCTCAAGTTCCAGTGCAGAGATC
CTACTTCTCTGAGTCAGCTGACCCCCTCCCCCCAATCCCTCAAACCTTGAGGAGAAG
TGGGGACCCCACCCCTCATCAGGAGTTCCAGTGCTGCATGCGATTATCTACCCACGT
CCACGCGGCCACCTCACCCTCTCCGCACACCTCTGGCTGTCTTTTTGTACTTTTTGTT
CCAGAGCTGCTTCTGTCTGGTTTATTTAGGTTTTATCCTTCCTTTTCTTTGAGAGTTCG
TGAAGAGGGAAGCCAGGATTGGGGACCTGATGGAGAGTGAGAGCATGTGAGGGGT
AGTGGGATGGTGGGGTACCAGCCACTGGAGGGGTCATCCTTGCCCATCGGGACCAG
AAACCTGGGAGAGACTTGGATGAGGAGTGGTTGGGCTGTGCCTGGGCCTAGCACGG
ACATGGTCTGTCCTGACAGCACTCCTCGGCAGGCATGGCTGGTGCCTGAAGACCCCA
GATGTGAGGGCACCACCAAGAATTTGTGGCCTACCTTGTGAGGGAGAGAACTGAGC
ATCTCCAGCATTCTCAGCCACAACCAAAAAAAAATAAAAAGGGCAGCCCTCCTTAC
CACTGTGGAAGTCCCTCAGAGGCCTTGGGGCATGACCCAGTGAAGATGCAGGTTTG
ACCAGGAAAGCAGCGCTAGTGGAGGGTTGGAGAAGGAGGTAAAGGATGAGGGITC
ATCATCCCTCCCTGCCTAAGGAAGCTAAAAGCATGGCCCTGCTGCCCCTCCCTGCCT
CCACCCACAGTGGAGAGGGCTACAAAGGAGGACAAGACCCTCTCAGGCTGTCCCAA
GCTCCCAAGAGCTTCCAGAGCTCTGACCCACAGCCTCCAAGTCAGGTGGGGTGGAG
TCCCAGAGCTGCACAGGGTTTGGCCCAAGTTTCTAAGGGAGGCACTTCCTCCCCTCG
CCCATCAGTGCCAGCCCCTGCTGGCTGGTGCCTGAGCCCCTCAGACAGCCCCCTGCC
CCGCAGGCCTGCCTTCTCAGGGACTTCTGCGGGGCCTGAGGCAAGCCATGGAGTGA
GACCCAGGAGCCGGACACTTCTCAGGAAATGGCTTTTCCCAACCCCCAGCCCCCACC
CGGTGGTTCTTCCTGTTCTGTGACTGTGTATAGTGCCACCACAGCTTATGGCATCTCA
TTGAGGACAAAGAAAACTGCACAATAAAACCAAGCCTCTGGAATCTGTCCTCGTGT
CCACCTGGCCTTCGCTCCTCCAGCAGTGCCTGCCTGCCCCCGCTTCGCTGGGGTCTCC
ACGGGTGAGGCTGGGGAACGCCACCTCTTCCTCTTCCCTGACTTCTCCCCAACCACT
TAGTAGCAACGCTACCCCAGGGGCTAATGACTGCACACTGGGCTTCTTTTCAGAATG
ACCCTAACGAGACACATTTGCCCAAATAAACGAACATCCCATGTCTGCTGACTCACC
TGGCTGGAACAACATGCTTACTGCCAACATGTGGGCCGAACCACATGGCCCTGGCTC
TGGAATGCACAAGTGGCTTTGCGTGAATCTGCGCTAAGCTATGCAGTCTGCTTTTTC
TTCTCAGCTCTGGTAGTTCTTCAGAAATGTACCCTCCAGGCACATCCACTATTGCGA
GGGTGAGCACGAAGGGTGGGAGATGCCCATGTCCTCAAGGCATCACTTCCTAAATC
CAAAAGCATCGGCAGGAGAAAGGACTGGGGACAAATACTGTCCCTTCGGGAGTAGG
GAGGGAACACTGAGGCCCATCCCTGGCTCCTTCCCTAAAAGTAGAGTAAAATGGAA
GCGAGCATCCTGGGATTGGGGGCAAGAGGGGGACCGCAGGGTAGCTGTGGGTTCCA
ACTGCTGTCAGAGTCAGAGAGGCAGCCCCAAGCCAGCCTCCCTGCTTTGCCAGGGA
ATTTGGGGGAGGAAGGTGACAGCTGCCCAGAGGCTGACTCATCTGATATTTAGCAC
TGGGTAGGATGATTGTTTCTGAGCATTTTTCTTAAAGGCCTCAGATCTAAATTATGCC
ACCGGCTCCCACTCTTGCTACCTCCCGTCAACTTCTCTGCCTTGCCTTCCACCCCTGT
AGTTACCATACACAGAGGAGGAGGAGCTGTCCTTGTCCCAGGTTGGGAGGCTGACA
ACCCCTTAGCAAGATGCTGCCAGCCCAGAGCTCTCCAAGGGGAGGAACACCCCTGA
GACTCAGGCCCCTCTCCTTCAGCCCTGCTTGGGCTGCAAGCGCCGTGCCAAGGAAAG
GCATCTTGGTGAGAAGAGCTGCTGTGGGGGAAGGGAGATCAAATGCCAGAGAAATG
TGGGGTGCCCCACCCTCAGGATAGTAAAAGAGTATGGAGGTATTTCTGGAAGGAAA
TGAGCGGCACTGTGTGAAGCCTCGCACCTGTGTGACACTTCCTATGGGGTCTTTGTC
ACACTCTAGTACTATGTCCCTGAAGAGTTTAGCAGCCACACTCTTAGAAGGGTGCTG
GGAGATGGTGTTGCCCTCTGCAGCCATGTTTAGGGGAGCGGAACCTGAGGCCCACA
GTGGGTGAGATTAGCTCAAGAAGCCACAGAGGCCACCAGAGGGCCACGGACTTCGG
AAAGGAGAAGAGAAGAACAGGGCATCAGGCCTCACAACGCAAACCTACCCAGAGA
TGGGCACAGTGGCTCATGCCTGTAATCCCACCACTTTGGGAAGAGGCGGATCGCTTG
AGGTCAGGAGTTCGAGACTAGCCTCGAAACCCTATCTCTACTAAAAATACAAAAAT
TAGCCAGGCATGGTGGCCTGCGCCTGTAATCCCAGCTACTCAGGAGGCTGAGGCAG
GAGAATCACTTGAACCCGGGAGGCGGAGGTTGCAGTGAGCCAAGATTGCACCACTG
CACTCCAGCCTGGGAGATAGAGTGAGACTCCATCTCAAAAAAATAAAAAATAAAAT
AAACCTACCCGGAATGACCATGCTGAGGACTGGGAGCCCGCAGACTTTCAGCCACA
GGCCGCGACAGCCGTGGGTCCCTCCCTGGTCAAGTCAGCAGGCCTTGTGGAGGCTGT
GGGGTATCTGTGGTGACTCAGGTAATTATAGAGGGCTGGCCCCCAGCCCTGGTTCCT
GTACACATGCCCCAACCCCATCCCCATCCACTCCCTCGCCAGTCCTAACCTCTTTCCT
GGGTCCCCCCCCTTCAGCACCTAAGTCCATACCTAGGGCCGTGGAATTCCCGCTCAA
GAGCAACAGAAGCCCCTCTCTGCACCCCCATTTCTGGACTGGATTGTCCACTGAGAC
GCGCAATGTCTGCATCTCTGACATCTAGAGGCITCCTCGGGAAGGGCATGGGGATCI
CCGTGAGATGTGGGGACTTTCACTGGCCAACCAAGAAATCTACACAGCGTCCGGGG
ACCTGTGACACACATCCCTCCCGCCTCCTCAACCTGATGTCCCTCTCTGAATCTGCAG
CTTTCGTGCTGTGAAGGTGTCTTTACATGTGAAACAAACAAACCCAAGTCAAGAGTA
AATCATCTCATTTACTAGTGAGAAAATGTTGGAGCTGGAGTCCTTCAGAGAGTCCTG
GCCAGGCAAGAGGGCCATCAGCTCTCTTCTGCTCAACAGGGGCTCTCAGCCTCAGG
ACACTCTCAGGCCTGGAATGTCCCCAACACACTCAAGGAGAAACATGTCCTGTGCA
GACCCACAGGAGGCATCTTTGCCCGGCACAAGGAAGAGCTGGGGTCAGTGGGACCT
GTAGATGTAGACACATCATATGGAGGGTGGGTAGGACCAATGTGGCAGCTTCATGG
AGGCCAAGTGTGGCTCTGCACCAGGAAGGGGCTGTGATGGCTGGAGGTGCCCAGCA
GTGCAGGCGGGGAGTGCCTGGCAGTGGCGTGGCCAGGTGGAGGCCACCTGTCAAGT
TTGCAATAAAGCAGTTTCCTGAATTTGGTGAGAA.

[0103] By “CD45 polypeptide” is meant a polypeptide or fragment thereof having at least about 95% amino acid sequence identity to an amino acid sequence provided at GenBank Accession No. NP_001254727 that binds an anti-CD45 antibody. An exemplary CD45 polypeptide sequence follows:

>NP_001254727.1 receptor-type tyrosine-protein phosphatase C
isoform 5 precursor [Homo sapiens]
(SEQ ID NO: 77)
MTMYLWLKLLAFGFAFLDTEVFVTGQSPTPSPTGHLQAEEQGSQSKSPNLKSREADS
FSWWPKAREPLTNHWSKSKSPKAEELGV.

[0104] By “CD45 polynucleotide” is meant a nucleic acid molecule that encodes a CD45 polypeptide. An exemplary CD45 polynucleotide sequence follows:

>NM_001267798.2 Homo sapiens protein tyrosine phosphatase receptor
type C (PTPRC), transcript variant 5, mRNA
(SEQ ID NO: 78)
GACATCATCACCTAGCAGTTCATGCAGCTAGCAAGTGGTTTGTTCTTAGGGTAACAG
AGGAGGAAATTGTTCCTCGTCTGATAAGACAACAGTGGAGAAAGGACGCATGCTGT
TTCTTAGGGACACGGCTGACTTCCAGATATGACCATGTATTTGTGGCTTAAACTCTT
GGCATTTGGCTTTGCCTTTCTGGACACAGAAGTATTTGTGACAGGGCAAAGCCCAAC
ACCTTCCCCCACTGGCCATCTGCAAGCTGAGGAGCAAGGAAGCCAATCCAAGTCAC
CAAACCTCAAAAGTAGGGAAGCTGACAGTTCAGCCTTCAGTTGGTGGCCAAAGGCC
CGAGAGCCCCTCACAAACCACTGGAGTAAGTCCAAGAGTCCAAAAGCTGAGGAACT
TGGAGTCTGATGTTCAAGAGCAGGAAGCAGCCAGCACGAGAGAAAGATGAAGACC
AGAAGACTCAGCAAGCTCACTTCTCCTACCTTCTTGTGCCTGCTTTTTCTAGCCGTGC
TGGCAGTTGCTTGGATGATGCCCACTCATATTGGGTGGGGGTGGGGGGGTTGGGGA
GGGTCTGCCTCCCCCAGTCCACTGACTCAAATGTTAATCTCCCTTGGCAATACGCTC
ACAGGCACACCCAGGAACAATACTTTGCATCCTTCAATCCAATCAAGTTGACACTCA
ATATTAACCATCAAATACTATTATAAGGAGAATGTTGCATGATTTTCCTTCTAGTCTG
TTTGTAATTCACATCTAATGAAAGAGTGAGAGTGGACGATAAAGGGAACTTGTTGA
AACATTTCTCTCAAAGCAAAAGGGATCATTGGAAGCAGGCAGACACCAGAATTGGT
TTAACCTAAAAATAACAAATTAATAATTATCAAGTCTATAATGATGACAGTGACTTA
ATGTGAATAGAAAGAATTCTAAACTCTCTCCTTCCTTCCTCCCTCCCTTCTTTCCTAC
TTTCTTTCCACTCCCTTTCTCCCACCCCCTTTTCTTTTCCTTTCTTTTCTCCCACCCTCT
CTCCCTCCCTTTCTTTTATTCAATGCATAGTAGTTGAAAAAATCTAAAGTTAGACCTG
ATTTTACACTGAAGACTAGAGGTAGTTACTATCCTATTACTGTACTTAGTTGGCTATG
CTGGCATGTCATTATGGGTAAAAGTTTGATGGATTTATTTGTGAGTTATTTGGTTATG
AAAATCTAGAGATTGAAGTTTTTCATTAGAAAATAACACACATAACAAGTCTATGAT
CATTTTGCATTTCTGTAATCACAGAATAGTTCTGCAATATTTCATGTATATTGGAATT
GAAGTTCAATTGAATTTTATCTGTATTTAGTAAAAATTAACTTTAGCTTTGATACTAA
TGAATAAAGCTGGGTTTTTTATTTA.

[0105] By “CD34 polypeptide” is meant a polypeptide or fragment thereof having at least about 95% amino acid sequence identity to an amino acid sequence provided at GenBank Accession No. NP_001020280 that binds an anti-CD34 antibody. An exemplary CD34 polypeptide sequence follows:

>NP_001020280.1 hematopoietic progenitor cell antigen CD34
isoform a precursor [Homo sapiens]
(SEQ ID NO: 79)
MLVRRGARAGPRMPRGWTALCLLSLLPSGFMSLDNNGTATPELPTQGTFSNVSTNVSY
QETTTPSTLGSTSLHPVSQHGNEATTNITETTVKFTSTSVITSVYGNTNSSVQSQTSVISTV
FTTPANVSTPETTLKPSLSPGNVSDLSTTSTSLATSPTKPYTSSSPILSDIKAEIKCSGIREVK
LTQGICLEQNKTSSCAEFKKDRGEGLARVLCGEEQADADAGAQVCSLLLAQSEVRPQC
LLLVLANRTEISSKLQLMKKHQSDLKKLGILDFTEQDVASHQSYSQKTLIALVTSGALLA
VLGITGYFLMNRRSWSPTGERLGEDPYYTENGGGQGYSSGPGTSPEAQGKASVNRGAQ
ENGTGQATSRNGHSARQHVVADTEL.

[0106] By “CD34 polynucleotide” is meant a nucleic acid molecule that encodes a CD34 polypeptide. An exemplary CD34 polynucleotide sequence follows:

>NM_001025109.2 Homo sapiens CD34 molecule (CD34), transcript
variant 1, mRNA
(SEQ ID NO: 80)
AGTGTCTTCCACTCGGTGCGTCTCTCTAGGAGCCGCGCGGGAAGGATGCTGGTCCGC
AGGGGCGCGCGCGCAGGGCCCAGGATGCCGCGGGGCTGGACCGCGCTTTGCTTGCT
GAGTTTGCTGCCTTCTGGGTTCATGAGTCTTGACAACAACGGTACTGCTACCCCAGA
GTTACCTACCCAGGGAACATTTTCAAATGTTTCTACAAATGTATCCTACCAAGAAAC
TACAACACCTAGTACCCTTGGAAGTACCAGCCTGCACCCTGTGTCTCAACATGGCAA
TGAGGCCACAACAAACATCACAGAAACGACAGTCAAATTCACATCTACCTCTGTGA
TAACCTCAGTTTATGGAAACACAAACTCTTCTGTCCAGTCACAGACCTCTGTAATCA
GCACAGTGTTCACCACCCCAGCCAACGTTTCAACTCCAGAGACAACCTTGAAGCCTA
GCCTGTCACCTGGAAATGTTTCAGACCTTTCAACCACTAGCACTAGCCTTGCAACAT
CTCCCACTAAACCCTATACATCATCTTCTCCTATCCTAAGTGACATCAAGGCAGAAA
TCAAATGTTCAGGCATCAGAGAAGTGAAATTGACTCAGGGCATCTGCCTGGAGCAA
AATAAGACCTCCAGCTGTGCGGAGTTTAAGAAGGACAGGGGAGAGGGCCTGGCCCG
AGTGCTGTGTGGGGAGGAGCAGGCTGATGCTGATGCTGGGGCCCAGGTATGCTCCC
TGCTCCTTGCCCAGTCTGAGGTGAGGCCTCAGTGTCTACTGCTGGTCTTGGCCAACA
GAACAGAAATTTCCAGCAAACTCCAACTTATGAAAAAGCACCAATCTGACCTGAAA
AAGCTGGGGATCCTAGATTTCACTGAGCAAGATGTTGCAAGCCACCAGAGCTATTCC
CAAAAGACCCTGATTGCACTGGTCACCTCGGGAGCCCTGCTGGCTGTCTTGGGCATC
ACTGGCTATTTCCTGATGAATCGCCGCAGCTGGAGCCCCACAGGAGAAAGGCTGGG
CGAAGACCCTTATTACACGGAAAACGGTGGAGGCCAGGGCTATAGCTCAGGACCTG
GGACCTCCCCTGAGGCTCAGGGAAAGGCCAGTGTGAACCGAGGGGCTCAGGAAAAC
GGGACCGGCCAGGCCACCTCCAGAAACGGCCATTCAGCAAGACAACACGTGGTGGC
TGATACCGAATTGTGACTCGGCTAGGTGGGGCAAGGCTGGGCAGTGTCCGAGAGAG
CACCCCTCTCTGCATCTGACCACGTGCTACCCCCATGCTGGAGGTGACATCTCTTAC
GCCCAACCCTTCCCCACTGCACACACCTCAGAGGCTGTTCTTGGGGCCCTACACCTT
GAGGAGGGGCAGGTAAACTCCTGTCCTTTACACATTCGGCTCCCTGGAGCCAGACTC
TGGTCTTCTTTGGGTAAACGTGTGACGGGGGAAAGCCAAGGTCTGGAGAAGCTCCC
AGGAACAATCGATGGCCTTGCAGCACTCACACAGGACCCCCTTCCCCTACCCCCTCC
TCTCTGCCGCAATACAGGAACCCCCAGGGGAAAGATGAGCTTTTCTAGGCTACAATT
TTCTCCCAGGAAGCTTTGATTTTTACCGTTTCTTCCCTGTATTTTCTTTCTCTACTTTG
AGGAAACCAAAGTAACCTTTTGCACCTGCTCTCTTGTAATGATATAGCCAGAAAAAC
GTGTTGCCTTGAACCACTTCCCTCATCTCTCCTCCAAGACACTGTGGACTTGGTCACC
AGCTCCTCCCTTGTTCTCTAAGTTCCACTGAGCTCCATGTGCCCCCTCTACCATTTGC
AGAGTCCTGCACAGTTTTCTGGCTGGAGCCTAGAACAGGCCTCCCAAGTTTTAGGAC
AAACAGCTCAGTTCTAGTCTCTCTGGGGCCACACAGAAACTCTTTTTGGGCTCCTTTT
TCTCCCTCTGGATCAAAGTAGGCAGGACCATGGGACCAGGTCTTGGAGCTGAGCCTC
TCACCTGTACTCTTCCGAAAAATCCTCTTCCTCTGAGGCTGGATCCTAGCCTTATCCT
CTGATCTCCATGGCTTCCTCCTCCCTCCTGCCGACTCCTGGGTTGAGCTGTTGCCTCA
GTCCCCCAACAGATGCTTTTCTGTCTCTGCCTCCCTCACCCTGAGCCCCTTCCTTGCT
CTGCACCCCCATATGGTCATAGCCCAGATCAGCTCCTAACCCTTATCACCAGCTGCC
TCTTCTGTGGGTGACCCAGGTCCTTGTTTGCTGTTGATTTCTTTCCAGAGGGGTTGAG
CAGGGATCCTGGTTTCAATGACGGTTGGAAATAGAAATTTCCAGAGAAGAGAGTAT
TGGGTAGATATTTTTTCTGAATACAAAGTGATGTGTTTAAATACTGCAATTAAAGTG
ATACTGAAACACATCTGTTATGTGACTCTGTCTTAGCTGGGTGTGTCTGCATGCAAG
AGTGACACCCTCCATTAGACCTAGCTAGACTGTGCAGTGATGTGGTGGGGAGGACC
AGCCAGGGAAGAGGGAGCACCTCAGCAGACACAGGCACCAGCCAGGATGCTAAGG
ACCTTTAGCCAAGTCTGCCAACTATTCTCCTCCATGGGGAGAGGAAACATCCATTTC
CAGTGGTAGAAAGGCAGACCCGAATGTACCAGGGAGCTTCCAAATGGAGGGTGGTA
TGTTGGGTTCTTAGGAGCTGTACCCTTCATGAACACCCTTCTGAGAAGAGGAGCATG
CTGATCACTGCTGCAAAATATGCAAAACAAAGGGAAGGGGCAATGTCCTGTGCACC
CTTTATTATCAGGCCACCCCCCTCCCCAGCCCCCCAGGTCAGAGTAGACACAGTGAA
GGACTATGTGGGGACTGTTGTTCTAGAGACCTGGCAGCCAACTCAGGGAGGGGGCT
GGTTTCCACCCTCAAGATTAAGACAGCAGCCTAATTAAAAAAAAAATCTGTAAGCA
TGTACCTCCCCCCAGCTTCCAAAACAACCCCCACCCCACCCCTACCAGGCCATAGGA
AGTTGGGGAGGGAGTGCTGAGGAGCTCCAGGAAACACTCCCAAGTGTGTCGACAGT
GGCAGAGGCAGTTGGGGCCAAACAAAGGTTGATTCTTCCATTCTTATCTCCATAAAG
CCAGACCTTTCCCTTCAGCACTCCTCCACCCCCATCTCCTTCTTGCTTTTCTCCAACTC
CTCTAATCATAGGTTCTTCCCTAGGACAGAGGGGAGGCGAAATGATGAGGTTCAGA
GTCTTCCCTCAAAGGCGATGGCTGCCTTGAGGGTTGGAGCAAAGGATGATGAGCAA
AAGACGATGGTAATCAGTAGGGAAGTCCAGCCCACTTGCATCTAGTTGCACATCTTG
CCTTGAGAGTAATCCAGTGAGGGTCTGTCCCAGCTAGGACATCAAGTAGGAGGGGT
GGGTTCAGGGTTCAGATTCCTAGGAAATATGGGAGGAGAGGAAAAGGCAACTTGGA
TGCACCTCCAGCTTCAGGCCTAGCAACCTGCAATGCATCTCACCCTGAGTTTGCTGG
AATGTGTATGTATGCTTTGGGAGGAAGGGCTGTGTGTGTATTGCGGGGTGGGGTGG
GGCAGCTGGTTCCCTCTGACAGCTGGACAGCTTGCCCTGAAGAATTTGCCTGCTTTC
TGGAAAAATCCAACTTTCCCACCGTGGGCCTGAGCGTCCTGGTACAGCAATGGCGCC
ACCTGCTGGCCTTATTGAGGTCCTACTGCTCAGCCTCAGCTCAATCGCCTCCATGTTG
GGCTTCTCTCCCTGGCTGCCCCACCCTCTAGTCCAATTTCTCTTGTACACAAAGCTCA
TATAACTATAGAACGTCACTGTTGAAGAGAACTTTAAAGATACATTTAATTAAACTC
CCTTATGGTATAGTTAAAGACAAACTAAGGCTCAGAGAAGGGAGGTGGCTTGCCCA
ATCACCCAGAATTCCAAAGTCCTGAATCTGTAGTTTTCCCTTCCATCATATCATCCTA
CTCTTCTGCCGAGTCCTCCGTGTTACTCCAGTTGGATGTCATGAAGCCAGTGTGGCA
GTGTGAAGATAGGTTTGGGACTTCACTTCTGGAGCATTTCATCAACATAAGCTATCC
TAGGCCTGGCCAGCCAAGCAGGTCCTGGAGGAGCCCCAGGACAAAGATCACAGGA
GGCCATGAGGTTCGGCTTCTTCGGCGCCCACAGTGAGCCCAGGAAAATTAGCTGTA
GGGTATTACACTGTTGACTATGGAGAGCATATCTGGAATTATCTTCAGCCAGATTTT
CATCTGAATGGATAAATGGGAATACCATCTAAGTCCAGATAAATAGATCACTTCCAT
CTCATCCCTTCTAGGTAGATTAATCCCACACTTCCTCTTCACACAAAACCAGTAATA
GGTCATCGATTTTGTGCAACAGGATGCTGCTTCTCTTCCTAAAGCCCCCATCGAAGA
GGCTTCCAGCCACCATTCAATCATTCATCAAGTCTTATGATGTGCCAGACACTGCGC
GAAATGTGCCAGAACATCTGTTATGTGCCAGACACTGTTCTTGAGACTGGGGATACA
GCAAACACTCATGAAGCTTATAATTCTAGCAGAAGAGGACAGTAAACAATGTCATC
TCAGTAAGTATATACATGTGTTTTCAGGATTGAGAGCTATGAAAAACATAAAATATA
TTGAGAATAATGGTTGGTATTTTACATATGGTGGTTACTTTTAGAAAAATAACAGTG
GAGAGCACAGCTTCACTTGAATGAAGTGGAGAAGCAGGTTGTATGCCAAGCTGGGA
GAGATTATCCCACACAGGGGAAAGGACAAGTGCAAAGCCCTATGATGAAAAGCTGC
CAAGTGCAGAAAGCCTCAGATGGCAGGGGGCAAGATGGCCATGAGGTTGTGTCAGT
GAGTGGGGGTGGGGAGAGGCAGGAGGTCAGACTACATGGGGCCTTTTTAGTTGTAG
ATTGGGAAGCCACTGGAGGGTTTTGAGCAGAGAAGTCATATCATCTGCTTTATGTTT
TAAAAGGATCATGCTGGCTGCTGAGTAGAGAATAGAGGTTGAGGGATAAGAAAGTA
GAAGGAGACCGTAGCAAGAAGAACGATCATGGCTGGGAGCAGGTGATCATATTGGC
AGTGATGAGATCAAGCAGAATTCAAAAAGTGGTTTCAAAGTAGAGGTAACAGGACT
TGCTCAGTCTATTTATTTCTTCAAATAATAATCATATTTACAATGATAGTAGCTAACA
GTTTTTGAGTGCTTACTGTATGAAAATTGAGATATGGTGCCAATATTTAAATAGCAT
ATTTTACTTAACATTCACAGAAACCCTGTGAAGTAGGTTCTATTATCTCAGAAAAAG
AAACTGAAACTCAGAGAATAACAAGGGACTGTGTTACGTGCACAGTGGCAGAGGCA
AAGATGAATAGGATGTGAGTTTATTTGAACCCCAAATGTTTAAATCTTGGGGATAAT
ACAACACACATTTAAACAAAGAAGCAAGAAAAAAAATGCACAACAGAAAGTGAGA
AATAACACGAGGAAAGACTAAATGAAGTGCTTTGTATCTAGATGTGGGCAGGACCC
TTTCCAGCTGAGAAGATCTGAGACTGGGTCATGAACAGGTGGTTTCTGAGTGGGTCC
TGTAAAAATGAATACGATTTTGATGATAGTAATGAGTAAGGACATTTGAGACTGAT
AGAAGAGTACATACAATATGTAGTGATGGGGAAAGATAAGGTACTGTCAAAGGACA
ATGTGTTTTCTGGTATGACAGAGAAGTAGAATGTGTTAAGGGAAGCCGAGTACCAG
AAAGATCCGGGTGTCACAGTTTGTGTAGGGTGTTTAAAGCTAAACCACAGAGTTTAA
TTTTATCCAATAGAAGAGGAGCCACAGAAGAGTTTCCATTTATTCATTAATTTATTC
ATTTATTCAAAAAATATTTGAGTGCTTATTATAAGCCAGGTACTATGCCAGGCACCT
GGGATAAGACATAGTCCCTTCTGTCAAGTCTTTACATTGGGTGGATGTGGGAGGGAC
AGATGACAGAACAATATGCATTGAGTGTAAGTGCTATGGTATAGGAAGCTCTGAGT
GGGAGGGGCATGGAAGCCGTGGAAGACCATGGAAGGCTTCCCAGGAGAAGTGACG
TCTGGACTGATCCTTTGGTCAAGCAGGAGTTAAAGAGGAGAAAAGGAGAGATATGG
GTGTTCCCGAGAGAGGAAGAAGCCTTGTCCCAGGAGCAAAGTGAGGGTGATTGTTC
CAGAAATGTGAGTGATTCTTTTAAGGCTCAAGCAAAGCATGTGATTCTTCTTTATAC
CTTCTATTTCTTTGCTGAGTGTTTCTGTTCTTTTGTTTCAAGCATGCTGCAATTGCTCA
TTAAAGCATGTTTATGATGGCTGTCTGTTTTAAAATTCTTGTCAGATGGTTTCAACAT
CTTTATCATCTCAATGTTGGCATCTGTTAATGGTTTTTTCTCAATCAAATTGAGATTT
TCCTGGTTCTTGGTATTACCAGTGATTTTAATTGCATCTGGAAATTTGGGATTTATGT
TGAAAGACTGGATCTTATTGAAAGATTCTGTTTAGCACCCCTCCTTTGATACCACAC
TGGTGGGTCCAGGTTCCCCATTCAGCTGTTGACACCTTCAGGGCAGAGAGGTGGGAT
GGGGTGAAGGGGGTACCTCATTATTGCTGGCCCAGGTTAGAAGTTCAGGCTTCCCAG
TAGATCTCTGCTGATACCACCCTGGTGCCATGTCATTCCTTGAGTCCAAAAGTCCCTC
CCAATTCTGCCTTCTTCTCTCTACATATCGGAGTCTCCCTATGTTTGACTTATATATA
ATGTCCAGGGTTTTTAGAGTTAGTTAACAGGAGGCATAAGAAAAAGTGTGTCCACTC
CATCTTGTCTGGAACTGGAAGTTCAAGTCGAATATAAGAGAGAGGAGAGGAAATTA
CAAGCCATGAGACTGGAGAGTTAGGCAGGTTCTACACCAGCTATTCTCAAAGCCCTC
TTACACTCTTAAAAATTTAGAACTTCAAAGAGCTTTTGATTTTGAAAGTTACATCTAT
CAATTATTACTGTTTCAAAAATTAAAATTGAGAAAATTTTATTTATTAATTTGTTTAA
AAATAACAATAATTATTCAATTACATGATAATGTAAGTAATGCTTTTCTTAATGAAA
AATAATTATATTTTCCAAAACAAAAACAATTAGGAAAAAGAGTGTCATTGTTTTAGA
CTTTGGTAAATCTCTCTAATATCTGGCTGAAGAGAAGAATGCTGATTCTTTTTTTTTT
TTTTTTTTTTTGAGACGGAGTCTCGCTCTGTCACCCAGGCTGGAGTGTAGTGGTGTGA
TCTCGGCTCACTGCAAGCTCTGCCTCCCGGGTTCACGCCATTCTCCTGCCTCAGCCTC
CCAAGTAGCTGGGACTACAGGCACCCGCCACCACGCCCGGCTAATTTTTTTGTATTT
TTAGTAGAGATGGGGTTTCACCGTGTTAGCCAGGCTGGTCTCGATCTCCTGACCTCA
TGATCCACCCACCTCAGCCTCCCAAAGCGCTGGGATTACAGGTGTGAGACACCGCG
CCCAGCCCCCGAATGCTGATTCTTTTATCTGCTTCTGTATTCAATCTGTTGTGATATG
ATGGGTAGCCTCTGAAACACTCCACTGTATACTTGTGAAAGAATGAATGTGAAAAA
GGAAAATAGATTTGTAGTATTATTATTCAAATTGTTTTGACCTCAGAGACCACTTGG
AAATGTTTTAGGGAACCCCCAGAGGACCTTGGATCATGCTTTGAGAACCGCGGCTCT
AGATATGTTACTATTTCAGTAGCATCTAAGTACATGTGGCTGCTGAGCACTTGTAAT
GTGGCTAGTGCAAATGAGAGACAGGACTTCCAGCTATATGTAATTTAATAAACTCA
AATTTAAAAACTGGAACCTCATAAAATGTTTTGTTGTTGTTGTTAAACATGACCTTAT
AGTTTTGGTAGGAA.

[0107] By “Stem Cell Factor (SCF) polypeptide” is meant a polypeptide or fragment thereof having at least about 95% amino acid sequence identity to an amino acid sequence provided at GenBank Accession No. NP_000890 that functions in hematopoiesis. In some embodiments, a SCF polypeptide or fragment thereof binds CD117. An exemplary SCF polypeptide sequence follows:

>NP_000890.1 kit ligand isoform b precursor [Homo sapiens]
(SEQ ID NO: 81)
MKKTQTWILTCIYLQLLLFNPLVKTEGICRNRVTNNVKDVTKLVANLPKDYMITLKYVP
GMDVLPSHCWISEMVVQLSDSLTDLLDKFSNISEGLSNYSIIDKLVNIVDDLVECVKENS
SKDLKKSFKSPEPRLFTPEEFFRIFNRSIDAFKDFVVASETSDCVVSSTLSPEKDSRVSVTK
PFMLPPVAASSLRNDSSSSNRKAKNPPGDSSLHWAAMALPALFSLIIGFAFGALYWKKR
QPSLTRAVENIQINEEDNEISMLQEKEREFQEV.

[0108] By “SCF polynucleotide” is meant a nucleic acid molecule that encodes a SCF polypeptide. An exemplary SCF polynucleotide sequence follows:

>NM_003994.5 Homo sapiens KIT ligand (KITLG), transcript variant a,
mRNA
(SEQ ID NO: 82)
GGGCTTCGCTCGCCGCCTCGCGCCGAGACTAGAAGCGCTGCGGGAAGCAGGGACAG
TGGAGAGGGCGCTGCGCTCGGGCTACCCAATGCGTGGACTATCTGCCGCCGCTGTTC
GTGCAATATGCTGGAGCTCCAGAACAGCTAAACGGAGTCGCCACACCACTGTTTGT
GCTGGATCGCAGCGCTGCCTTTCCTTATGAAGAAGACACAAACTTGGATTCTCACTT
GCATTTATCTTCAGCTGCTCCTATTTAATCCTCTCGTCAAAACTGAAGGGATCTGCAG
GAATCGTGTGACTAATAATGTAAAAGACGTCACTAAATTGGTGGCAAATCTTCCAA
AAGACTACATGATAACCCTCAAATATGTCCCCGGGATGGATGTTTTGCCAAGTCATT
GTTGGATAAGCGAGATGGTAGTACAATTGTCAGACAGCTTGACTGATCTTCTGGACA
AGTTTTCAAATATTTCTGAAGGCTTGAGTAATTATTCCATCATAGACAAACTTGTGA
ATATAGTGGATGACCTTGTGGAGTGCGTGAAAGAAAACTCATCTAAGGATCTAAAA
AAATCATTCAAGAGCCCAGAACCCAGGCTCTTTACTCCTGAAGAATTCTTTAGAATT
TTTAATAGATCCATTGATGCCTTCAAGGACTTTGTAGTGGCATCTGAAACTAGTGAT
TGTGTGGTTTCTTCAACATTAAGTCCTGAGAAAGGGAAGGCCAAAAATCCCCCTGGA
GACTCCAGCCTACACTGGGCAGCCATGGCATTGCCAGCATTGTTTTCTCTTATAATT
GGCTTTGCTTTTGGAGCCTTATACTGGAAGAAGAGACAGCCAAGTCTTACAAGGGC
AGTTGAAAATATACAAATTAATGAAGAGGATAATGAGATAAGTATGTTGCAAGAGA
AAGAGAGAGAGTTTCAAGAAGTGTAATTGTGGCTTGTATCAACACTGTTACTTTCGT
ACATTGGCTGGTAACAGTTCATGTTTGCTTCATAAATGAAGCAGCTTTAAACAAATT
CATATTCTGTCTGGAGTGACAGACCACATCTTTATCTGTTCTTGCTACCCATGACTTT
ATATGGATGATTCAGAAATTGGAACAGAATGTTTTACTGTGAAACTGGCACTGAATT
AATCATCTATAAAGAAGAACTTGCATGGAGCAGGACTCTATTTTAAGGACTGCGGG
ACTTGGGTCTCATTTAGAACTTGCAGCTGATGTTGGAAGAGAAAGCACGTGTCTCAG
ACTGCATGTACCATTTGCATGGCTCCAGAAATGTCTAAATGCTGAAAAAACACCTAG
CTTTATTCTTCAGATACAAACTGCAGCCTGTAGTTATCCTGGTCTCTGCAAGTAGATT
TCAGCTTGGATAGTGAGGGTAACAATTTTTCTCAAAGGGATCTGGAAAAAATGTTTA
AAACTCAGTAGTGTCAGCCACTGTACAGTGTAGAAAGCAGTGGGAACTGTGATTGG
ATTTGGCAACATGTCAGCTTTATAGTTGCCGATTAGTGATATGGGTCTGATTTCGATC
TCTTCCTGATGTAAACCATGCTCACCCATATCCCACTATACAAATGCAAATGGTTGC
CTGGTTCCATTTATGCAAGGGAGCCAGTACTGAATTATGCCTTGGCAGAGGGGAGA
CTCCAAAAGAGTCATCGCAGGAAGAAGTTAAGAACACTGAACATCAGAACAGTCTG
CCAAGAAGGACATTGGCATCCTGGGAAAGTCCGCCTTTTCCCTTGACCACTATAGGG
TGTATAAATCGTGTTTGCAAAATGTGTTATGATGTGTTTATATTCTAAAACTATTACA
GAGCTATGTAAAGGGACTTAGGAGAAAATGCTGAATGTAAGATGGTCCCATTTCAA
TTTCCACCATGGGAGAGCCTAAAAATAAATTATGACATTTAGTATCTAAGGTTAGAA
AACCACGCCCACATGCTAATATGGGTGTTGAAAACTAGGTTACTTATAATGCAAGG
AATCAGGAAACTTTAGTTATTTATAGTATAATCACCATTATCTGTTTAAAGGATCCA
TTTAGTTAAAATCGGGCACTCTATATTCATTAAGGTTTATGAATTAAAAAGAAAGCT
TTATGTAGTTATGCATGTCAGTTTGCTATTTAAAATGTGTGACAGTGTTTGTCATATT
AAGAGTGAATTTGGCAGGAATTCCCAAGATGGACATTGTGCTTTTAAACTAGAACTT
GTAAGACATTATGTGAATATCCCTTGCCAATTTTTTTTATAATAAGAAAACATCTGA
CTAAAGTCAAAGAATGATTTCTTATGGTTTATTTTGATGAAAGTTCTTTTAACATGTC
TTGAATGTACACATAAAGGAATCCAAAGCTTTCCATTCTAACTTAATCTTTGTGATA
ACATTATTGCCATGTTCTACAACCGTAAGATGACAGTTTTCAATGTAGTGACACAAA
AGGGCATGAAAAACTAACTGCTAGCTTTCCTTTCATTTCAAAAGTCCAAGAATTTCT
AGTATATTTGGATTTTAGCTTCTGTTCAAAGCAAATCCAGATGCAACTCCAGTAAGT
GGCCTTTGCTCTTTTTTGTACCAAAGAGCCCAGATGATTCCTACAGTCCCTTTCTTCT
CTAACATGCTGTGGTTCCTTAAATATGAGTAATTTCTCTAAGATATAACCCAGGTGC
TTTGAGAAGCTGCATTAAGGTGTTCAGGCCCTCAGATATCACATGGTACACTTGATT
AGTAATAAAACCAGAGATCAATTTAAATTGCTGATAGGTCCTGTCTCAGTGTGTGGC
ATTGACTGTTTTCAGGAAAATAGATACAGATTAATATGAGTTATGCGTGTAGGTTGT
GTATAGATTGAGAAGATAGATACTTCTCAATCTAGTAGTTTGATTTATTTAACCAAT
GGTTTCAGTTTGCTTGAGCATATGAAAATCCTGCTTAATGTGCTTAAGAGTATAATA
AATGTGTACTTTTGTCCTCAAACCTAGTAGCTGGGTTTTAACACTCATGGACATGGT
CTTAATCAATGGAGTTAAATAAACAAATTCAGCAAGTTATTAAATCTGACATGGTAG
GAGAGGGGAGATGTGTCCTGCTTATTAAATGTGTTGGTCCATTGAAAGTTACATGGA
TTGCCAATTTTTAAAACACTAAAGTTGAATAAAATGCATGAACAATAGAAAAATGC
TGAACATTATTTTGGATGCTAGCTGCTTGGACATTAACTGTGTTATTTCTGCTTTGAG
ATGAAAATATATATTTATCTTTGCTTATTTTATCCCAGATGTGTTCTGAATATCCTTC
TTCATAAATCATGGAAAACTCACTGCTGAGATAGTAAACCATGAAATCGCCTTTTCA
GTTGGTGCCATGTATCTGACAGTTCCATCTTGGAAGGTTTCAAAATTACCTTTTAAA
ATGATCTCAGAAGTCTGTAGATTCTCAATGATACTGAAAGCTTTGCACCTCTTTGGT
AGAAACCAGGTCTATTTAGAAAATGGCTTTATGATAAATGTTGCCTCCTGAGTGATA
ATGAAGTGTTCCTGGATATTGTATTGTAATTTAATGTGCTTACCACACTGCCACATTT
TAATGAGTCAGAGAAAAATTAATTTTTCTTCAATACAATAATAGAACAAGTAGCCTA
TTCTCTTAAAAAGTATGTGAAAAGAAAATTATGAAAAAATATGCATACCTAATGAA
GTATTGGTTTTAGTAAGAATTAAATACATTTCATTGAGCTTTAAAGTACTTTGGAGA
AACTTTGGGGCACGTTTTCCTACTCTAATTCAACTAAAGTTATAAATAAAGAGAAAA
ACTCATTCAGAAATCATGGATTTTAAAAATATTTTACTGCAGCCAAGTTTTCATTTCA
AAATGTAATTTCAGTTTGGAGCTTTTAGGCATTATGTATATTTAAAAAATATATTCTT
CAAAAATGCATTTTGGCATGGTGGGATGGATGTTGCAAAAGATATCCGGAGCCTCC
AGTCTGTCATTAACTGATATGGTAAATCACCTCTCTTCTTTGGGTCTCAATTTTTTAT
TTATCTATATGGTAAACTCAGAGATCACTCCTTAGGGGTGAGTCCTATTGCAATATG
ACCGACAAAGAAGACAAAATAGCATTGAAACTAACCCATACAAAATATCCAACTCT
GGATTCTGTGAATAAGTATCTTGACCATAAAAAGTCATTGCTGTTCTTGTTTCTAATG
TAAATAGTGTCCATTAGTAAAAGTGAAATTCAGTCTTAAGTAGGGTGAATTGGATCA
CCATTTACACAAGAGATGGCTTTTTCCTTTGCTTGAATAAACATTTTGGATCACCTCC
AAAGAATGAAAACCAGTAGTACGTTTTAGTCATATTAGTCAGGATGAGAAACTATA
AGATGTGTGTAACATTTGGAAATGCACCAAAGTGAGCGTTTAAATCTTCTCATTTTA
TTGAAAACTAAGAGCAGAAAATGTAAAATGCTCATGAAGGTTTTGAATGCCAAAAG
ATATTTTAGAATCAATTTATAAAGGGGTAATTCATTAATTACACTTTAAAATTGGAA
AGTGGGATAAGAAATCTAAAGTAAACCAGCTTATCTTTGAAACAATATTATTTTGAA
ATTGGCTTTAAAATAAAACCATTCAGATTGAAATTCTAATTAGCTCATTTGTGGAGT
TTGATCACACAATTCATAATGTTGCTGCTTTCCATTAACTAGTCTTGAAATGCCTTTG
TTTGTAAAAATAAAATAATGGTACTTTCATTTTATAACAAGGTGTTTTTTTCAAGAA
ATAATCCATGCTAAAATGGATATTTGTGATCCTGAAATGTTTACTAAGCATTGTAAA
TTTATTTATAACTGCCATCTCCAACTACATCCTTATGATGTTTTTAACAATAAAATTA
AAACAACTGTTAAACTAAAAACCACACCGTTTTCCAGTACTTGATCTCTGAGCTACA
ATACTCACTAAATATAATTTTCCAATCAAAATATTCTATTCTATATTCTAAGGGTTAA
TATGTGATTATAGTGTCCACTTGCCACCATTTTTTTAAATCAATGGACTTGAAAAGTA
TTAATTTAGATGGATGCGCAGATATACCCTCAGTTCAGTCATAGATTGGAGTTTGCA
TATAATAATGTAAATGTATGTCGACACTATTCTAAATAGTTCTATTATGACTGAAAT
TTAATTAAATAAAAAAGGTTGTAAAATGTGATGTGTATGTGTATATACTGTATGTGT
ACTTTTTAAAATAGGTGTATGTCCCAACCCTTTTTTATACAGGTTTGAATTTAAAATT
ACATGATATATACATATACTTTATTGTTCTAAATAAAGAATTTTATGCACTCTCAAA
AAAAAAAAAAAAAAA.

[0109] The term “linker”, as used herein, refers to a molecule that links two moieties. In one embodiment, the term “linker” refers to a covalent linker (e.g., covalent bond) or a non-covalent “Makassar” or “Hb G-Makassar” refers to a human β-hemoglobin variant, the human Hemoglobin (Hb) of G-Makassar variant or mutation (HB Makassar variant), which is an asymptomatic, naturally-occurring variant (E6A) hemoglobin. Hb G-Makassar was first identified in Indonesia. (Mohamad, A. S. et al., 2018, Hematol. Rep., 10(3):7210 (doi:10.4081/hr.2018.7210). The Hb G-Makassar mobility is slower when subjected to electrophoresis. The Makassar β-hemoglobin variant has its anatomical abnormality at the β-6 or A3 location where the glutamyl residue typically is replaced by an alanyl residue. The substitution of single amino acid in the gene encoding the β-globin subunit β-6 glutamyl to valine will result as sickle cell disease. Routine procedures, such as isoelectric focusing, hemoglobin electrophoresis separation by cation-exchange High Performance Liquid Chromatography (HPLC) and cellulose acetate electrophoresis, have been unable to separate the Hb G-Makassar and HbS globin forms, as they were found to have identical properties when analyzed by these methods. Consequently, Hb G-Makassar and HbS have been incorrectly identified and mistaken for each other by those skilled in the art, thus leading to misdiagnosis of Sickle Cell Disease (SCD). In one embodiment, the valine at amino acid position 6, which causes sickle cell disease, is replaced with an alanine, to thereby generate an Hb variant (Hb Makassar) that does not generate a sickle cell phenotype. In some embodiments, a Val to Ala (GTG to GCG) replacement (i.e., the Hb Makassar variant) can be generated using an A⋅T to G⋅C base editor (ABE).

[0110] Thus, the present invention includes compositions and methods for base editing a thymidine (T) to a cytidine (C) in the codon of the sixth amino acid of a sickle cell disease variant of the β-globin protein (Sickle HbS; E6V), thereby substituting an alanine for a valine (V6A) at this amino acid position. Substitution of alanine for valine at position 6 of HbS generates a β-globin protein variant that does not have a sickle cell phenotype (e.g., does not have the potential to polymerize as in the case of the pathogenic variant HbS). Accordingly, the compositions and methods of the invention are useful for the treatment of sickle cell disease (SCD).

[0111] By “marker” is meant any protein or polynucleotide having an alteration in expression level or activity that is associated with a disease or disorder, such as, for example, sickle cell disease (SCD), thalassemia, anemia, hemoglobin C disease, hemoglobin S-C disease, or other hemaglobinopathies involving the abnormal or aberrant production or structure of hemoglobin.

[0112] The term “mutation,” as used herein, refers to a substitution of a residue within a sequence, e.g., a nucleic acid or amino acid sequence, with another residue, or a deletion or insertion of one or more residues within a sequence. Mutations are typically described herein by identifying the original residue followed by the position of the residue within the sequence and by the identity of the newly substituted residue. Various methods for making the amino acid substitutions (mutations) provided herein are well known in the art, and are provided by, for example, Green and Sambrook, Molecular Cloning: A Laboratory Manual (4^{th} ed., Cold Spring Harbor Laboratory Press, Cold Spring Harbor, N.Y. (2012)).

[0113] The term “single nucleotide polymorphism (SNP)” is a variation in a single nucleotide that occurs at a specific position in the genome, where each variation is present to some appreciable degree within a population (e.g. >1%). For example, at a specific base position in the human genome, the C nucleotide can appear in most individuals, but in a minority of individuals, the position is occupied by an A. This means that there is a SNP at this specific position, and the two possible nucleotide variations, C or A, are said to be alleles for this position. SNPs underlie differences in susceptibility to disease. The severity of illness and the way our body responds to treatments are also manifestations of genetic variations. SNPs can fall within coding regions of genes, non-coding regions of genes, or in the intergenic regions (regions between genes). In some embodiments, SNPs within a coding sequence do not necessarily change the amino acid sequence of the protein that is produced, due to degeneracy of the genetic code. SNPs in the coding region are of two types: synonymous and nonsynonymous SNPs. Synonymous SNPs do not affect the protein sequence, while nonsynonymous SNPs change the amino acid sequence of protein. The nonsynonymous SNPs are of two types: missense and nonsense. SNPs that are not in protein-coding regions can still affect gene splicing, transcription factor binding, messenger RNA degradation, or the sequence of noncoding RNA. Gene expression affected by this type of SNP is referred to as an eSNP (expression SNP) and can be upstream or downstream from the gene. A single nucleotide variant (SNV) is a variation in a single nucleotide without any limitations of frequency and can arise in somatic cells. A somatic single nucleotide variation can also be called a single-nucleotide alteration.

[0114] The terms “nucleic acid” and “nucleic acid molecule,” as used herein, refer to a compound comprising a nucleobase and an acidic moiety, e.g., a nucleoside, a nucleotide, or a polymer of nucleotides. Typically, polymeric nucleic acids, e.g., nucleic acid molecules comprising three or more nucleotides are linear molecules, in which adjacent nucleotides are linked to each other via a phosphodiester linkage. In some embodiments, “nucleic acid” refers to individual nucleic acid residues (e.g. nucleotides and/or nucleosides). In some embodiments, “nucleic acid” refers to an oligonucleotide chain comprising three or more individual nucleotide residues. As used herein, the terms “oligonucleotide” and “polynucleotide” can be used interchangeably to refer to a polymer of nucleotides (e.g., a string of at least three nucleotides). In some embodiments, “nucleic acid” encompasses RNA as well as single and/or double-stranded DNA. Nucleic acids may be naturally occurring, for example, in the context of a genome, a transcript, an mRNA, tRNA, rRNA, siRNA, snRNA, a plasmid, cosmid, chromosome, chromatid, or other naturally occurring nucleic acid molecule. On the other hand, a nucleic acid molecule may be a non-naturally occurring molecule, e.g., a recombinant DNA or RNA, an artificial chromosome, an engineered genome, or fragment thereof, or a synthetic DNA, RNA, DNA/RNA hybrid, or including non-naturally occurring nucleotides or nucleosides. Furthermore, the terms “nucleic acid,” “DNA,” “RNA,” and/or similar terms include nucleic acid analogs, e.g., analogs having other than a phosphodiester backbone. Nucleic acids can be purified from natural sources, produced using recombinant expression systems and optionally purified, chemically synthesized, etc. Where appropriate, e.g., in the case of chemically synthesized molecules, nucleic acids can comprise nucleoside analogs such as analogs having chemically modified bases or sugars, and backbone modifications. A nucleic acid sequence is presented in the 5′ to 3′ direction unless otherwise indicated. In some embodiments, a nucleic acid is or comprises natural nucleosides (e.g. adenosine, thymidine, guanosine, cytidine, uridine, deoxyadenosine, deoxythymidine, deoxyguanosine, and deoxycytidine); nucleoside analogs (e.g., 2-aminoadenosine, 2-thiothymidine, inosine, pyrrolo-pyrimidine, 3-methyl adenosine, 5-methylcytidine, 2-aminoadenosine, C5-bromouridine, C5-fluorouridine, C5-iodouridine, C5-propynyl-uridine, C5-propynyl-cytidine, C5-methylcytidine, 2-aminoadenosine, 7-deazaadenosine, 7-deazaguanosine, 8-oxoadenosine, 8-oxoguanosine, 0(6)-methylguanine, and 2-thiocytidine): chemically modified bases; biologically modified bases (e.g., methylated bases); intercalated bases; modified sugars (2′—e.g., fluororibose, ribose, 2′-deoxyribose, arabinose, and hexose); and/or modified phosphate groups (e.g., phosphorothioates and 5′-N-phosphoramidite linkages).

[0115] The term “nuclear localization sequence,” “nuclear localization signal,” or “NLS” refers to an amino acid sequence that promotes import of a protein into the cell nucleus. Nuclear localization sequences are known in the art and described, for example, in Plank et al., International PCT application, PCT/EP2000/011690, filed Nov. 23, 2000, published as WO/2001/038547 on May 31, 2001, the contents of which are incorporated herein by reference for their disclosure of exemplary nuclear localization sequences. In other embodiments, the NLS is an optimized NLS described, for example, by Koblan et al., Nature Biotech. 2018 doi:10.1038/nbt.4172. In some embodiments, an NLS comprises the amino acid sequence

(SEQ ID NO: 83)
KRTADGSEFESPKKKRKV,
(SEQ ID NO: 84)
KRPAATKKAGQAKKKK,
(SEQ ID NO: 85)
KKTELQTTNAENKTKKL,
(SEQ ID NO: 86)
KRGINDRNFWRGENGRKTR,
(SEQ ID NO: 87)
RKSGKIAAIVVKRPRK,
(SEQ ID NO: 88)
PKKKRKV,
or
(SEQ ID NO: 89)
MDSLLMNRRKFLYQFKNVRWAKGRRETYLC.

[0116] The term “nucleobase,” “nitrogenous base,” or “base,” used interchangeably herein, refers to a nitrogen-containing biological compound that forms a nucleoside, which in turn is a component of a nucleotide. The ability of nucleobases to form base pairs and to stack one upon another leads directly to long-chain helical structures such as ribonucleic acid (RNA) and deoxyribonucleic acid (DNA). Five nucleobases—adenine (A), cytosine (C), guanine (G), thymine (T), and uracil (U)—are called primary or canonical. Adenine and guanine are derived from purine, and cytosine, uracil, and thymine are derived from pyrimidine. DNA and RNA can also contain other (non-primary) bases that are modified. Non-limiting exemplary modified nucleobases can include hypoxanthine, xanthine, 7-methylguanine, 5,6-dihydrouracil, 5-methylcytosine (m5C), and 5-hydromethylcytosine. Hypoxanthine and xanthine can be created through mutagen presence, both of them through deamination (replacement of the amine group with a carbonyl group). Hypoxanthine can be modified from adenine. Xanthine can be modified from guanine. Uracil can result from deamination of cytosine. A “nucleoside” consists of a nucleobase and a five carbon sugar (either ribose or deoxyribose). Examples of a nucleoside include adenosine, guanosine, uridine, cytidine, 5-methyluridine (m5U), deoxyadenosine, deoxyguanosine, thymidine, deoxyuridine, and deoxycytidine. Examples of a nucleoside with a modified nucleobase includes inosine (I), xanthosine (X), 7-methylguanosine (m7G), dihydrouridine (D), 5-methylcytidine (m5C), and pseudouridine (W). A “nucleotide” consists of a nucleobase, a five carbon sugar (either ribose or deoxyribose), and at least one phosphate group.

[0117] The terms “nucleic acid” and “nucleic acid molecule,” as used herein, refer to a compound comprising a nucleobase and an acidic moiety, e.g., a nucleoside, a nucleotide, or a polymer of nucleotides.

[0118] As used herein, the terms “oligonucleotide” and “polynucleotide” can be used interchangeably to refer to a polymer of nucleotides.

[0119] The term “nucleic acid programmable DNA binding protein” or “napDNAbp” may be used interchangeably with “polynucleotide programmable nucleotide binding domain” to refer to a protein that associates with a nucleic acid (e.g., DNA or RNA), such as a guide nucleic acid or guide polynucleotide (e.g., gRNA), that guides the napDNAbp to a specific nucleic acid sequence. In some embodiments, the polynucleotide programmable nucleotide binding domain is a polynucleotide programmable DNA binding domain. In some embodiments, the polynucleotide programmable nucleotide binding domain is a polynucleotide programmable RNA binding domain. In some embodiments, the polynucleotide programmable nucleotide binding domain is a Cas9 protein. A Cas9 protein can associate with a guide RNA that guides the Cas9 protein to a specific DNA sequence that is complementary to the guide RNA. In some embodiments, the napDNAbp is a Cas9 domain, for example a nuclease active Cas9, a Cas9 nickase (nCas9), or a nuclease inactive Cas9 (dCas9). Non-limiting examples of nucleic acid programmable DNA binding proteins include, Cas9 (e.g., dCas9 and nCas9), Cas12a/Cpf1, Cas12b/C2c1, Cas12c/C2c3, Cas12d/CasY, Cas12e/CasX, Cas12g, Cas12h, Cas12i, and Cas12j/CasΦ (Cas12j/Casphi). Non-limiting examples of Cas enzymes include Cas1, Cas1B, Cas2, Cas3, Cas4, Cas5, Cas5d, Cas5t, Cas5h, Cas5a, Cas6, Cas7, Cas8, Cas8a, Cas8b, Cas8c, Cas9 (also known as Csn1 or Csx12), Cas10, Cas10d, Cas12a/Cpf1, Cas12b/C2c1, Cas12c/C2c3, Cas12d/CasY, Cas12e/CasX, Cas12g, Cas12h, Cas12i, Cas12j/CasΦ, Cpf1, Csy1, Csy2, Csy3, Csy4, Cse1, Cse2, Cse3, Cse4, Cse5e, Csc1, Csc2, Csa5, Csn1, Csn2, Csm1, Csm2, Csm3, Csm4, Csm5, Csm6, Cmr1, Cmr3, Cmr4, Cmr5, Cmr6, Csb1, Csb2, Csb3, Csx17, Csx14, Csx10, Csx16, CsaX, Csx3, Csx1, Csx1S, Csx11, Csf1, Csf2, CsO, Csf4, Csd1, Csd2, Cst1, Cst2, Csh1, Csh2, Csa1, Csa2, Csa3, Csa4, Csa5, Type II Cas effector proteins, Type V Cas effector proteins, Type VI Cas effector proteins, CARF, DinG, homologues thereof, or modified or engineered versions thereof. Other nucleic acid programmable DNA binding proteins are also within the scope of this disclosure, although they may not be specifically listed in this disclosure. See, e.g., Makarova el al. “Classification and Nomenclature of CRISPR-Cas Systems: Where from Here?” CRISPR J. 2018 October; 1:325-336. doi: 10.1089/crispr.2018.0033; Yan et al., “Functionally diverse type V CRISPR-Cas systems” Science. 2019 Jan. 4:363(6422):88-91. doi: 10.1126/science.aav7271, the entire contents of each are hereby incorporated by reference. Exemplary nucleic acid programmable DNA binding proteins and nucleic acid sequences encoding nucleic acid programmable DNA binding proteins are provided in the Sequence Listing as SEQ ID NOs: 90-123 and 158.

[0120] The terms “nucleobase editing domain” or “nucleobase editing protein,” as used herein, refers to a protein or enzyme that can catalyze a nucleobase modification in RNA or DNA, such as cytosine (or cytidine) to uracil (or uridine) or thymine (or thymidine), and adenine (or adenosine) to hypoxanthine (or inosine) deaminations, as well as non-templated nucleotide additions and insertions. In some embodiments, the nucleobase editing domain is a deaminase domain (e.g., an adenine deaminase, an adenosine deaminase; a cytidine deaminase or a cytosine deaminase).

[0121] As used herein, “obtaining” as in “obtaining an agent” includes synthesizing, generating, producing, isolating, purchasing, or otherwise acquiring the agent.

[0122] A “patient” or “subject” as used herein refers to a mammalian subject or individual diagnosed with, at risk of having or developing, susceptible to having or developing, or suspected of having or developing a disease or a disorder. In some embodiments, the term “patient” refers to a mammalian subject with a higher than average likelihood of developing a disease or a disorder. Exemplary patients can be humans, non-human primates, cats, dogs, pigs, cattle, horses, camels, llamas, goats, sheep, rodents (e.g., mice, rabbits, rats, or guinea pigs) and other mammalians that can benefit from the therapies disclosed herein. Exemplary human patients can be male and/or female.

[0123] “Patient in need thereof” or “subject in need thereof” is referred to herein as a patient diagnosed with, at risk or having, predetermined to have, or suspected of having a disease or disorder.

[0124] The terms “pathogenic mutation”, “pathogenic variant”, “disease casing mutation”, “disease causing variant”, “deleterious mutation”, or “predisposing mutation” refers to a genetic alteration or mutation that increases an individual's susceptibility or predisposition to a certain disease or disorder. In some embodiments, the pathogenic mutation comprises at least one wild-type amino acid substituted by at least one pathogenic amino acid in a protein encoded by a gene.

[0125] The terms “protein”, “peptide”, “polypeptide”, and their grammatical equivalents are used interchangeably herein, and refer to a polymer of amino acid residues linked together by peptide (amide) bonds. A protein, peptide, or polypeptide can be naturally occurring, recombinant, or synthetic, or any combination thereof.

[0126] The term “fusion protein” as used herein refers to a hybrid polypeptide which comprises protein domains from at least two different proteins.

[0127] The term “recombinant” as used herein in the context of proteins or nucleic acids refers to proteins or nucleic acids that do not occur in nature, but are the product of human engineering. For example, in some embodiments, a recombinant protein or nucleic acid molecule comprises an amino acid or nucleotide sequence that comprises at least one, at least two, at least three, at least four, at least five, at least six, or at least seven mutations as compared to any naturally occurring sequence.

[0128] By “reduces” is meant a negative alteration of at least 10%, 25%, 50%, 75%, or 100%.

[0129] By “reference” is meant a standard or control condition. In one embodiment, the reference is a wild-type or healthy cell. In other embodiments and without limitation, a reference is an untreated cell that is not subjected to a test condition, or is subjected to placebo or normal saline, medium, buffer, and/or a control vector that does not harbor a polynucleotide of interest. In some embodiments, a reference is a subject that has not been administered a treatment. In some embodiments, a reference is a subject that has not been administered a composition of the invention. In some embodiments, a reference is a subject that has not been administered a cell of the invention.

[0130] A “reference sequence” is a defined sequence used as a basis for sequence comparison. A reference sequence may be a subset of or the entirety of a specified sequence; for example, a segment of a full-length cDNA or gene sequence, or the complete cDNA or gene sequence. For polypeptides, the length of the reference polypeptide sequence will generally be at least about 16 amino acids, at least about 20 amino acids, at least about 25 amino acids, about 35 amino acids, about 50 amino acids, or about 100 amino acids. For nucleic acids, the length of the reference nucleic acid sequence will generally be at least about 50 nucleotides, at least about 60 nucleotides, at least about 75 nucleotides, about 100 nucleotides or about 300 nucleotides or any integer thereabout or therebetween. In some embodiments, a reference sequence is a wild-type or naturally occurring sequence of a protein or polypeptide of interest. In other embodiments, a reference sequence is a polynucleotide sequence encoding a wild-type or naturally occurring protein or polynucleotide. In some embodiments, a reference sequence may be a nonmutated or normal sequence.

[0131] The term “RNA-programmable nuclease,” and “RNA-guided nuclease” are used with (e.g., binds or associates with) one or more RNA(s) that is not a target for cleavage. In some embodiments, an RNA-programmable nuclease, when in a complex with an RNA, may be referred to as a nuclease:RNA complex. Typically, the bound RNA(s) is referred to as a guide RNA (gRNA). In some embodiments, the RNA-programmable nuclease is the (CRISPR-associated system) Cas9 endonuclease, for example, Cas9 (Csn1) from Streptococcus pyogenes.

[0132] The term “single nucleotide polymorphism (SNP)” is a variation in a single nucleotide that occurs at a specific position in the genome, where each variation is present to some appreciable degree within a population (e.g., >1%).

[0133] By “specifically binds” is meant a nucleic acid molecule, polypeptide, polypeptide/polynucleotide complex, compound, or molecule that recognizes and binds a polypeptide and/or nucleic acid molecule of the invention, but which does not substantially recognize and bind other molecules in a sample, for example, a biological sample.

[0134] By “substantially identical” is meant a polypeptide or nucleic acid molecule exhibiting at least 50% identity to a reference amino acid sequence. In one embodiment, a reference sequence is a wild-type amino acid or nucleic acid sequence. In another embodiment, a reference sequence is any one of the amino acid or nucleic acid sequences described herein. In one embodiment, such a sequence is at least 60%, 80%, 85%, 90%, 95% or even 99% identical at the amino acid level or nucleic acid level to the sequence used for comparison.

[0135] Sequence identity is typically measured using sequence analysis software (for example, Sequence Analysis Software Package of the Genetics Computer Group, University of Wisconsin Biotechnology Center, 1710 University Avenue, Madison, Wis. 53705, BLAST, BESTFIT, GAP, or PILEUP/PRETTYBOX programs). Such software matches identical or similar sequences by assigning degrees of homology to various substitutions, deletions, and/or other modifications. Conservative substitutions typically include substitutions within the following groups: glycine, alanine; valine, isoleucine, leucine; aspartic acid, glutamic acid, asparagine, glutamine; serine, threonine; lysine, arginine; and phenylalanine, tyrosine. In an exemplary approach to determining the degree of identity, a BLAST program may be used, with a probability score between e⁻³ and e⁻¹⁰⁰ indicating a closely related sequence. COBALT is used, for example, with the following parameters:
[0136] a) alignment parameters: Gap penalties −11, −1 and End-Gap penalties −5, −1.
[0137] b) CDD Parameters: Use RPS BLAST on; Blast E-value 0.003; Find Conserved columns and Recompute on, and
[0138] c) Query Clustering Parameters: Use query clusters on; Word Size 4; Max cluster distance 0.8; Alphabet Regular.
   EMBOSS Needle is used, for example, with the following parameters:
[0139] a) Matrix: BLOSUM62;
[0140] b) GAP OPEN: 10;
[0141] c) GAP EXTEND: 0.5;
[0142] d) OUTPUT FORMAT: pair;
[0143] e) END GAP PENALTY: false;
[0144] f) END GAP OPEN: 10; and
[0145] g) END GAP EXTEND: 0.5.

[0146] Nucleic acid molecules useful in the methods of the invention include any nucleic acid molecule that encodes a polypeptide of the invention or a fragment thereof. Such nucleic acid molecules need not be 100% identical with an endogenous nucleic acid sequence, but will typically exhibit substantial identity. Polynucleotides having “substantial identity” to an endogenous sequence are typically capable of hybridizing with at least one strand of a double-stranded nucleic acid molecule. Nucleic acid molecules useful in the methods of the invention include any nucleic acid molecule that encodes a polypeptide of the invention or a fragment thereof. Such nucleic acid molecules need not be 100% identical with an endogenous nucleic acid sequence, but will typically exhibit substantial identity. Polynucleotides having “substantial identity” to an endogenous sequence are typically capable of hybridizing with at least one strand of a double-stranded nucleic acid molecule. By “hybridize” is meant pair to form a double-stranded molecule between complementary polynucleotide sequences (e.g., a gene described herein), or portions thereof, under various conditions of stringency. (See, e.g., Wahl, G. M. and S. L. Berger (1987) Methods Enzymol. 152:399; Kimmel, A. R. (1987) Methods Enzymol. 152:507).

[0147] For example, stringent salt concentration will ordinarily be less than about 750 mM NaCl and 75 mM trisodium citrate, preferably less than about 500 mM NaCl and 50 mM trisodium citrate, and more preferably less than about 250 mM NaCl and 25 mM trisodium citrate. Low stringency hybridization can be obtained in the absence of organic solvent, e.g., formamide, while high stringency hybridization can be obtained in the presence of at least about 35% formamide, and more preferably at least about 50% formamide. Stringent temperature conditions will ordinarily include temperatures of at least about 30° C., more preferably of at least about 37° C., and most preferably of at least about 42° C. Varying additional parameters, such as hybridization time, the concentration of detergent, e.g., sodium dodecyl sulfate (SDS), and the inclusion or exclusion of carrier DNA, are well known to those skilled in the art. Various levels of stringency are accomplished by combining these various conditions as needed. In a preferred: embodiment, hybridization will occur at 30° C. in 750 mM NaCl, 75 mM trisodium citrate, and 1% SDS. In a more preferred embodiment, hybridization will occur at 37° C. in 500 mM NaCl, 50 mM trisodium citrate, 1% SDS, 35% formamide, and 100 μg/ml denatured salmon sperm DNA (ssDNA). In a most preferred embodiment, hybridization will occur at 42° C. in 250 mM NaCl, 25 mM trisodium citrate, 1% SDS, 50% formamide, and 200 μg/ml ssDNA. Useful variations on these conditions will be readily apparent to those skilled in the art.

[0148] For most applications, washing steps that follow hybridization will also vary in stringency. Wash stringency conditions can be defined by salt concentration and by temperature. As above, wash stringency can be increased by decreasing salt concentration or by increasing temperature. For example, stringent salt concentration for the wash steps will preferably be less than about 30 mM NaCl and 3 mM trisodium citrate, and most preferably less than about 15 mM NaCl and 1.5 mM trisodium citrate. Stringent temperature conditions for the wash steps will ordinarily include a temperature of at least about 25° C., more preferably of at least about 42° C., and even more preferably of at least about 68° C. In an embodiment, wash steps will occur at 25° C. in 30 mM NaCl, 3 mM trisodium citrate, and 0.1% SDS. In another embodiment, wash steps will occur at 42 C in 15 mM NaCl, 1.5 mM trisodium citrate, and 0.1% SDS. In a more preferred embodiment, wash steps will occur at 68° C. in 15 mM NaCl, 1.5 mM trisodium citrate, and 0.1% SDS. Additional variations on these conditions will be readily apparent to those skilled in the art. Hybridization techniques are well known to those skilled in the art and are described, for example, in Benton and Davis (Science 196:180, 1977); Grunstein and Hogness (Proc. Natl. Acad. Sci., USA 72:3961, 1975); Ausubel et al. (Current Protocols in Molecular Biology, Wiley Interscience, New York, 2001); Berger and Kimmel (Guide to Molecular Cloning Techniques, 1987, Academic Press, New York); and Sambrook et al., Molecular Cloning: A Laboratory Manual, Cold Spring Harbor Laboratory Press, New York.

[0149] By “split” is meant divided into two or more fragments.

[0150] A “split Cas9 protein” or “split Cas9” refers to a Cas9 protein that is provided as an N-terminal fragment and a C-terminal fragment encoded by two separate nucleotide sequences. The polypeptides corresponding to the N-terminal portion and the C-terminal portion of the Cas9 protein may be spliced to form a “reconstituted” Cas9 protein.

[0151] The term “target site” refers to a sequence within a nucleic acid molecule that is deaminated by a deaminase (e.g., cytidine or adenine deaminase) or a fusion protein comprising a deaminase (e.g., a dCas9-adenosine deaminase fusion protein or a base editor disclosed herein). In embodiments, the fusion protein comprises ABE8. In an embodiment, the fusion protein comprises ABE8.8.

[0152] As used herein, the terms “treat,” treating,” “treatment,” and the like refer to reducing or ameliorating a disorder and/or symptoms associated therewith or obtaining a desired pharmacologic and/or physiologic effect. It will be appreciated that, although not precluded, treating a disorder or condition does not require that the disorder, condition or symptoms associated therewith be completely eliminated. In some embodiments, the effect is therapeutic, i.e., without limitation, the effect partially or completely reduces, diminishes, abrogates, abates, alleviates, decreases the intensity of, or cures a disease and/or adverse symptom attributable to the disease. In some embodiments, the effect is preventative, i.e., the effect protects or prevents an occurrence or reoccurrence of a disease or condition. To this end, the presently disclosed methods comprise administering a therapeutically effective amount of a compositions as described herein.

[0153] By “uracil glycosylase inhibitor” or “UGI” is meant an agent that inhibits the uracil-excision repair system. Base editors comprising a cytidine deaminase convert cytosine to uracil, which is then converted to thymine through DNA replication or repair. Including an inhibitor of uracil DNA glycosylase (UGI) in the base editor prevents base excision repair which changes the U back to a C. An exemplary UGI comprises an amino acid sequence as follows:

>sp|P147391UNGI_BPPB2 Uracil-DNA glycosylase
inhibitor
(SEQ ID NO: 124)
MTNLSDIIEKETGKQLVIQESILMLPEEVEEVIGNKPESDILVHTAYDE
STDENVMLLTSDAPEYKPWALVIQDSNGENKIKML.

[0154] Ranges provided herein are understood to be shorthand for all of the values within the range. For example, a range of 1 to 50 is understood to include any number, combination of numbers, or sub-range from the group consisting 1, 2, 3, 4, 5, 6, 7, 8, 9, 10, 11, 12, 13, 14, 15, 16, 17, 18, 19, 20, 21, 22, 23, 24, 25, 26, 27, 28, 29, 30, 31, 32, 33, 34, 35, 36, 37, 38, 39, 40, 41, 42, 43, 44, 45, 46, 47, 48, 49, or 50.

[0155] The recitation of a listing of chemical groups in any definition of a variable herein includes definitions of that variable as any single group or combination of listed groups. The recitation of an embodiment for a variable or aspect herein includes that embodiment as any single embodiment or in combination with any other embodiments or portions thereof.

[0156] All terms are intended to be understood as they would be understood by a person skilled in the art. Unless defined otherwise, all technical and scientific terms used herein have the same meaning as commonly understood by one of ordinary skill in the art to which the disclosure pertains

[0157] In this application, the use of the singular includes the plural unless specifically stated otherwise. It must be noted that, as used in the specification, the singular forms “a,” “an” and “the” include plural referents unless the context clearly dictates otherwise. In this application, the use of “or” means “and/or” unless stated otherwise. Furthermore, use of the term “including” as well as other forms, such as “include”, “includes,” and “included,” is not limiting.

[0158] As used in this specification and claim(s), the words “comprising” (and any form of comprising, such as “comprise” and “comprises”), “having” (and any form of having, such as “have” and “has”), “including” (and any form of including, such as “includes” and “include”) or “containing” (and any form of containing, such as “contains” and “contain”) are inclusive or open-ended and do not exclude additional, unrecited elements or method steps. It is contemplated that any embodiment discussed in this specification can be implemented with respect to any method or composition of the present disclosure, and vice versa. Furthermore, compositions of the present disclosure can be used to achieve methods of the present disclosure.

[0159] The term “about” or “approximately” means within an acceptable error range for the particular value as determined by one of ordinary skill in the art, which will depend in part on how the value is measured or determined, i.e., the limitations of the measurement system. For example, “about” can mean within 1 or more than 1 standard deviation, per the practice in the art. Alternatively, “about” can mean a range of up to 20%, up to 10%, up to 5%, or up to 1% of a given value. Alternatively, particularly with respect to biological systems or processes, the term can mean within an order of magnitude, e.g., within 5-fold, within 2-fold of a value. Where particular values are described in the application and claims, unless otherwise stated, the term “about” means within an acceptable error range for the particular value should be assumed.

[0160] Reference in the specification to “some embodiments,” “an embodiment,” “one embodiment” or “other embodiments” means that a particular feature, structure, or characteristic described in connection with the embodiments is included in at least some embodiments, but not necessarily all embodiments, of the present disclosures.

### BRIEF DESCRIPTION OF THE DRAWINGS

[0161] FIG. 1 depicts plasmids containing polynucleotides encoding an adenosine deaminase, e.g., TadA tRNA deaminase, and a Cas9 protein, e.g., dCas9, and gRNA as used in ABE nucleobase editing in mammalian cells.

[0162] FIG. 2 is a schematic depicting an exemplary study design workflow involving electroporation (EP) of human CD34+ cells for engraftment in a mouse for proof of concept experiments. As shown in the schematic, the study design includes the following procedure: thaw the cells; culture the cells for 2 days in cell culture flasks (or plates or conical tubes); EP buffer exchange and wash the cells; electroporate the cells, e.g., with mRNA encoding ABE base editor and gRNA; 20 minute, 37° C. EP incubation; 2 day culture of the cells in cell culture flasks (or plates or conical tubes); cryopreservation of the cells; and engraftment of the cells into a mouse model.

[0163] FIGS. 3A and 3B are bar graphs. FIG. 3A shows the percent of A→G (A→G %) edited CD34⁺ cells from two donors (donor 1, donor 2) using ABE 8.8 (50 nM), ABE 8.8 (20 nM) and ABE 7.10 (50 nM) adenosine nucleobase editing systems. FIG. 3B shows viability of edited cells as a percentage (%) of total edited cells at 48 hours post-electroporation (EP). In the sets of bar graphs shown, the leftmost bar (at baseline) represents unedited cells; the second bar from the left represents cells treated with 50 nM ABE8.8; the third bar from the left represents cells treated with 20 nM ABE8.8; and the fourth bar from the left represents cells treated with 50 nM ABE7.10.

[0164] FIGS. 4A and 4B are bar graphs. FIG. 4A (cells from donor 1) and FIG. 4B (cells from donor 2) present data showing hCD45⁺ cells as a percentage (%) of total CD45⁺ cells in mouse bone marrow (BM) at the indicated periods after injection (engraftment). Indicated mice groups received unedited cells, and hCD34⁺ cells edited using ABE 8.8 (50 nM), ABE 8.8 (20 nM) or ABE 7.10 (50 nM) ABE nucleobase editing systems as indicated. In the sets of bar graphs shown, the leftmost set of bars represents unedited cells; the set of bars second from the left represents cells treated with 50 nM ABE8.8; the set of bars third from the left represents cells treated with 20 nM ABE8.8; and the set of bars fourth from the left represents cells treated with 50 nM ABE7.10.

[0165] FIGS. 5Ai, 5Aii, and 5B-5E are bar graphs. FIGS. 5Ai and 5Aii present data showing A→G % edited cells in mouse bone marrow, at the time of injection (In), at 8 weeks and at 16 weeks post-injection in the indicated groups of engrafted mice. Treated (edited) hCD34⁺ cells were edited using ABE 8.8 (50 nM), ABE 8.8 (20 nM) and ABE 7.10 (50 nM) ABE nucleobase editing systems. FIGS. 5B (cells from donor 1) and 5C (cells from donor 1) present results from sorted cell populations of the indicated mice groups at 16 weeks post-injection (dose). Sorting was performed using flow cytometry. CD34⁺ cells were further sorted for Lin 34 and Gly A markers. FIGS. 5D and 5E show results of expression levels of gamma globin protein in engrafted mice at 16 weeks after injection with edited donor cells. (FIG. 5D—results from recipients of donor 1 cells; FIG. 5E—results from recipients of donor 2 cells). n=3-6 mice per group. In FIGS. 5Ai-5C, the leftmost set of bars represents unedited cells (baseline); the set of bars second from the left represents cells treated with 50 nM ABE8.8; the set of bars third from the left represents cells treated with 20 nM ABE8.8; and the set of bars fourth from the left represents cells treated with 50 nM ABE7.10. In FIGS. 5D and 5E, the leftmost bar represents unedited cells; the bar second from the left represents cells treated with 50 nM ABE8.8; the bar third from the left represents cells treated with 20 nM ABE8.8; and the bar fourth from the left represents cells treated with 50 nM ABE7.10.

[0166] FIGS. 6A-6C are bar graphs presenting data collected at 16-weeks following engraftment of human CD34⁺ cells from a single healthy donor into NOD.Cg-Kit^{W-41j} Tyr⁺ Prkdc^{scid} Il2rg^{tmlWjl}/ThomJ (NBSGW) mouse bone marrow (N=6 for chimerism and editing, N=5 for induction). FIG. 6A is a bar graph comparing the percentage of edited or unedited CD34⁺ cells that were engrafted. FIG. 6B is a bar graph showing the efficiency of base editing. FIG. 6C is a bar graph showing expression levels of gamma globin in edited and unedited cells.

[0167] FIGS. 7A-7B present bar graphs and stacked bar graphs relating to CD34⁺ cells from a sickle cell disease (SCD) patient that were transfected with ABE8.8 mRNA and sgRNA using electroporation. FIG. 7A is a bar graph showing percent cells edited at 48 hours and at 14 days post-electroporation. FIG. 7B is a stacked bar graph showing the different edits (including bystander editing) contained within each indicated cell population at the indicated time points.

[0168] FIGS. 8A-8D are plots and bar graphs relating to globin levels analyzed on day 18 post-differentiation for edited sickle cell disease (SCD)-CD34⁺ cells that were differentiated to erythroid cells. FIGS. 8A and 8B are plots showing peaks corresponding to identified globin polypeptides. FIG. 8C is a bar graph presenting percent change in expression of gamma globin (corresponding to HbF levels) in the edited cells, and FIG. 8D is a bar graph presenting a concurrent percent reduction in S globin in the edited cells. In the bar graphs, the leftmost bar represents unedited cells, and the rightmost bar represents base-edited cells. The y-axis of FIG. 8C reflects γ/(γ+S+Δ)*100 and the y-axis of FIG. 8D reflects S/(γ+S+Δ)*100.

[0169] FIGS. 9A-9C present a schematic depiction and bar graphs. FIG. 9A depicts the experimental design and treatment conditions used in the study described in Example 5 herein. FIGS. 9B and 9C shows bar graphs and results demonstrating long term (16 weeks) engraftment and HBG1/2 gene promoter base editing retention in NBSGW mice (NBSGW mouse model). FIG. 9B shows % hCD45+/(hCD45+mCD45+) human cell chimerism in bone marrow (BM). FIG. 9C shows % HBG1/2 promoter base editing in bulk BM cells. For the sets of bars in the graphs, the leftmost bar represents unedited cells; the second bar from the left represents cells treated with 1 nM ABE mRNA (MRNA288)+3000 nM gRNA; the third bar from the left represents cells treated with 3 nM ABE mRNA (MRNA288)+3000 nM gRNA; the fourth bar from the left represents cells treated with 10 nM ABE mRNA (MRNA288)+3000 nM gRNA; the fifth bar from the left represents cells treated with 30 nM ABE mRNA (MRNA288)+3000 nM gRNA; the sixth bar from the left represents cells treated with 10 nM ABE mRNA (Lot R34)+3000 nM gRNA; and the seventh bar from the left represents cells treated with 10 nM ABE mRNA (Lot R34)+3000 nM gRNA. In the experiments, the ABE mRNA is ABE8.8 mRNA and the gRNA is HBG1/2 gRNA. ABE8.8 encoding mRNA, MRNA288 (produced by CRO); ABE8.8 encoding mRNA, Lot R34 (research grade); and pilot HBG1/2 gRNA (GMP-like gRNA) are as described in Example 5. The legend provided in FIG. 9C applies to FIGS. 9B and 9C.

[0170] FIGS. 10A-10D present bar graphs demonstrating that HBG1/2 gene promoter-edited human stem cells (HSCs) display long term, multi-lineage (e.g., erythroid, myeloid, lymphoid) hematopoietic reconstitution in NBSGW mice (the NBSGW mouse model). In the bar graphs, the leftmost bar represents unedited cells; the second bar from the left represents cells treated with 1 nM ABE mRNA (MRNA288)+3000 nM gRNA; the third bar from the left represents cells treated with 3 nM ABE mRNA (MRNA288)+3000 nM gRNA; the fourth bar from the left represents cells treated with 10 nM ABE mRNA (MRNA288)+3000 nM gRNA; the fifth bar from the left represents cells treated with 30 nM ABE mRNA (MRNA288)+3000 nM gRNA; the sixth bar from the left represents cells treated with 10 nM ABE mRNA (Lot R34)+3000 nM gRNA; and the seventh bar from the left represents cells treated with 10 nM ABE mRNA (Lot R34)+3000 nM gRNA. In the experiments, the ABE mRNA is ABE8.8 mRNA and the gRNA is HBG1/2 gRNA. The legend to the right of FIG. 10B applies to FIGS. 10A-10D.

[0171] FIG. 11 presents a bar graph showing results that demonstrate long term human hematopoietic, multi-lineage reconstitution in NBSGW mice at 16 weeks post electroporation of the cells with the base editor (ABE mRNA) and gRNA. Percent (%) HBG1/2 promoter base editing in human hematopoietic cell subpopulations was assessed. In the figure, the leftmost series of 5 bars (i.e., Bulk BM, CD15+, CD19+, Lin−CD34+, BlyA+) represent unedited cells; the second series of 5 bars from the left represents cells treated with 1 nM ABE mRNA (MRNA288)+3000 nM gRNA; the third series of 5 bars from the left represents cells treated with 3 nM ABE mRNA (MRNA288)+3000 nM gRNA; the fourth series of 5 bars from the left represents cells treated with 10 nM ABE mRNA (MRNA288)+3000 nM gRNA; the fifth series of 5 bars from the left represents cells treated with 30 nM ABE mRNA (MRNA288)+3000 nM gRNA; the sixth series of 5 bars from the left represents cells treated with 10 nM ABE mRNA (Lot R34)+3000 nM gRNA; and the seventh series of 5 bars from the left represents cells treated with 10 nM ABE mRNA (Lot R34)+3000 nM gRNA. In the experiments, the ABE mRNA is ABE8.8 mRNA and the gRNA is HBG1/2 gRNA.

[0172] FIGS. 12A and 12B present bar graphs demonstrating that HBG1/2 gene promoter base editing is maintained long term (16 weeks) post-engraftment with elevated gamma globin (γ-globin) levels in NBSGW mice. In FIG. 12A, the % HBG1/2 promoter base editing in bulk BM cells at 16 weeks was assessed. In FIG. 12B, the % γ-globin protein levels in flow cytometry-sorted BM-derived human erythroid cells were assessed. The cell treatments represented in the bar graphs shown are the same as those described above for FIGS. 10A-D. In the experiments, the ABE mRNA is ABE8.8 mRNA and the gRNA is HBG1/2 gRNA. The legend to the right of FIG. 12B applies to FIGS. 12A and 12B.

[0173] FIGS. 13A and 13B present bar graphs demonstrating that long term engraftment and HBG1/2 gene promoter base editing are retained in irradiated NSG (irrNSG) mice. FIG. 13A shows % hCD45+/(hCD45+mCD45+) human cell chimerism in bone marrow (BM). FIG. 13B shows % HBG1/2 promoter base editing in bulk BM cells. The bar graphs and sets of bar graphs shown in the figure represent the cell treatments as described above for FIGS. 9B and 9C. In the experiments, the ABE mRNA is ABE8.8 mRNA and the gRNA is HBG1/2 gRNA. The legend to the right of FIG. 13B applies to FIGS. 13A and 13B.

[0174] FIGS. 14A-14C present bar graphs demonstrating that HBG1/2 gene promoter-edited HPSCs displayed long term, multi-lineage (e.g., erythroid, myeloid, lymphoid) hematopoietic reconstitution in irrNSG mice. Shown are human progenitor stem cells (HPSCs), (FIG. 14A); human myeloid cells (FIG. 14B) and human lymphoid cells (FIG. 14C). The bar graphs in the figures represent the cell treatments as described above, e.g., in FIGS. 10A-10D. In the experiments, the ABE mRNA is ABE8.8 mRNA and the gRNA is HBG1/2 gRNA. The legend to the right of FIG. 14C applies to FIGS. 14A-14C.

[0175] FIG. 15 presents a bar graph showing % HBG1/2 promoter base editing in bulk BM cells assessed from NBSGW mice and from irrNSG mice at 16 weeks. FIG. 15 shows that comparable HBG1/2 gene promoter base editing was retained long term (16 weeks) in NBSGW mice and in irrNSG mice as determined by analysis of bulk bone marrow (BM) cells obtained from the mice. The bar graphs in the figure represent the cell treatments as described above, e.g. for FIGS. 13A and 13B. In the experiment, the ABE mRNA is ABE8.8 mRNA and the gRNA is HBG1/2 gRNA.

[0176] FIG. 16 presents a schematic and bar graphs showing the results of a long term engraftment study using the NBSGW mouse model and including a secondary engraftment component (16 weeks+8 weeks) of donor cells (HPSCs). The leftmost graph shows the percent human cell chimerism (hCD45+/(hCD45+mCD45+) in engrafted mice at 16 weeks+8 weeks post dose; the middle graph shows the % LIN-hCD34+ cells in engrafted mice at 16 weeks+8 weeks post dose; and the rightmost graph shows the % base editing (A→G) of bone marrow cells assessed from engrafted mice at 16+8 weeks post dose. In each of the bar graphs, the leftmost bar represents unedited HPSCs used for engraftment in NBSGW mice; the middle bar represents base-edited HPSCs electroporated using small scale electroporation (OC-400) used for engraftment into NBSGW mice; and the rightmost bar represents base-edited HPSCs electroporated using large scale electroporation (CL1.1) used for engraftment into NBSGW mice. In the experiments, the ABE mRNA is ABE8.8 mRNA and the gRNA is HBG1/2 gRNA.

[0177] FIGS. 17A and 17B present bar graphs showing assessments of human bone marrow (BM) cell chimerism (hCD45+/(hCD45+mCD45+), (FIG. 17A) and percent base editing in BM cells (FIG. 17B) at 13 weeks post-dose of ABE8.8 mRNA conducted during a dose titration study in the NBSGW mouse model (Example 5). Mean+/−SEM: N=1 at 13 weeks; N=3 at 8 weeks; N=1 at 0 weeks. For the bar graph or sets of bar graphs shown in the figure, the leftmost bar represents cells treated with 10 nM ABE8.8 mRNA (R34)+3000 nM gRNA; the rightmost bar represents cells treated with 30 nM mRNA (288)+3000 nM gRNA. In the experiments, the ABE mRNA is ABE8.8 mRNA and the gRNA is HBG1/2 gRNA.

[0178] FIGS. 18A and 18B present graphs showing apoptosis/cell viability as determined by flow cytometry analyses performed on freshly thawed donor cells after cryopreservation. The results show the percentage of live, dead and apoptotic CD34+ cells at 24 hr isolation and 48+ hr isolation versus control PBMCs, as described in Example 5. Also shown are the locations of live, dead and apoptotic cells on the graphs generated using an apoptosis detection kit and assessed by flow cytometry and antibody reagents directed against 7-AAD and Annexin V.

[0179] FIGS. 19A-19C present flow cytometry graphs showing the results of the assessment of apoptosis/cell viability; measurement of apoptosis; and lineage analysis of donor CD34+ cells. FIG. 19A shows apoptosis/cell viability as determined by flow cytometry analyses performed on “Pre-EP” CD34+ cell samples at 24 hr isolation and 48+ hr isolation, as described in Example 5. Cells were in culture for 48+ hours post thawing after cryopreservation (FIG. 19A). FIG. 19B shows the measurement of apoptosis determined by flow cytometry analyses performed on different groups of “Post-EP” CD34+ cell samples at 24 hr isolation and 48+ hr isolation (unedited versus base-edited CD34+ cells), as described in Example 5. FIG. 19C shows flow cytometry results of a lineage analysis performed on freshly thawed donor cells through 24 hr post electroporation using antibody reagents specific for the lineage markers analyzed. The SSC-A ordinate values are in 50 k increments ranging from 0 to 250 k; the CD15 ordinate values and the CD34 and CD19 abscissa values range logarithmically from 0 to 105.

[0180] FIGS. 20A and 20B show bar graphs which present the results of assessing percent cell viability and percent base editing (A to G) in unedited and base-edited cells. The bar graphs in FIG. 20A shows viability of the cells at pre-electroporation (Pre-EP), and at 24, 48 and 72 hours post electroporation, as described in Example 6. The bar graphs in FIG. 20B shows the percent of base editing achieved in the base-edited, transplanted cells at the indicated time periods. For the bar graph or sets of bar graphs shown in the FIGS. 20A and 20B, the leftmost bar represents unedited cells that were collected after 48+ hr pre-enrichment (48+ hr Pre-Enrich); the second bar from the left represents base-edited cells electroporated using the small scale OC-400 cell electroporation cartridge and treated as shown (48+ hr Pre-Enrich); the third bar from the left represents unedited cells that were collected after 24 hours pre-enrichment (24 hr Pre-Enrich); the fourth bar from the left represents base-edited cells electroporated using the small scale OC-400 cell electroporation cartridge (24 hr Pre-Enrich); and the rightmost bar represents edited cells electroporated using the large scale CL1.1 cell electroporation cartridge (24 hr Pre-Enrich). The “24 hr or 48+ hr pre-enrichment” of unedited and base-edited cells refer to the time period between isolating a blood sample (PBMCs) from a donor and enriching for CD34+ cells in the sample, as described in Example 6 herein. The legend to the right in FIG. 20B applies to FIGS. 20A and 20B.

[0181] FIGS. 21A and 21B present a bar graph and a graph depicting a cell growth curve. The bar graph shown in FIG. 21A presents the percentage of enucleated cells (% DAPI−/NucRed−) after thawing. The treatment conditions of cells represented by the bar graphs are shown along the abscissa of FIG. 21A. The graph in FIG. 21B presents the ‘theoretical total cells’ assessed on the indicated day after thawing. For FIGS. 21A and 21B, mean+/−SEM; N=3.

[0182] FIGS. 22A and 22B show bar graphs which present the results of assessing the amount of gamma globin induction (gamma/beta-like) and the number of colonies (CFUs) detected in unedited or base edited cells. FIG. 22A shows the amount of gamma globin induction (gamma/beta-like) produced or expressed by unedited cells under the pre-enrichment conditions shown and by base-edited cells subjected to small or large scale electroporation and the pre-enrichment conditions shown (mean+/−SEM; N=3). FIG. 22B shows the number of colonies of the types shown (BFU-E, CFU-GM, and CFU-GEMM) produced by either unedited cells under the pre-enrichment conditions shown or by base-edited cells subjected to small scale (OC400) or large scale (CL1.1) electroporation and the pre-enrichment conditions shown (mean+/−SEM; N=2).

[0183] FIGS. 23A and 23B show bar graphs which present the results of assessing human donor cell chimerism in mouse bone marrow (BM) and percent base editing (A to G) in animals at 8 weeks post dosing with unedited or base-edited donor CD34+ cells. FIG. 23A shows the percentage of human donor cell chimerism (hCD45+/(hCD45++mCD45+) in mouse bone marrow (BM) assessed at 8 weeks after mice were dosed (transplanted) with unedited or based-edited CD34+ cells that had been electroporated under small scale (OC400) or large scale (CL1.1) electroporation conditions and subjected to either 24 or 48+ hour pre-enrichment conditions. FIG. 23B shows the percentage of base editing (A to G) in the cell materials shown on the x-axis (input; bulk BM; CD34+/LIN−; and whole blood) at 8 weeks after administration/transplant into animals (n=3 at 8 weeks). The bars and sets of bars in the graphs represent the cells and conditions as described for FIGS. 20A and 20B.

[0184] FIGS. 24A-24D show bar graphs which present the results of assessing human donor cell chimerism in mouse bone marrow (BM), percent hCD15+ cells, percent GlyA+ cells and percent human CD34+ cells in animals at 8 and 16 weeks post dosing with unedited or base-edited donor CD34+ cells. FIG. 24A shows the percentage of human donor cell chimerism (hCD45+/(hCD45++mCD45+) in mouse bone marrow (BM) detected at 16 weeks after mice were dosed (transplanted) with unedited or based-edited CD34+ cells that had been electroporated under small scale (OC400) or large scale (CL1.1) electroporation and subjected to either 24 or 48+ hour pre-enrichment conditions. FIG. 24B shows the percentage of hCD15+ cells detected in mice at 8 weeks after mice were dosed (transplanted) with unedited or based-edited CD34+ cells that had been electroporated under small scale (OC400) or large scale (CL1.1) electroporation conditions and subjected to either 24 or 48+ hour pre-enrichment conditions. FIG. 24C shows the percentage of GlyA+ cells detected in mice at 16 weeks after mice were dosed (transplanted) with unedited or based-edited CD34+ cells that had been electroporated under small scale (OC400) or large scale (CL1.1) electroporation conditions and subjected to either 24 or 48+ hour pre-enrichment conditions. FIG. 24D shows the percentage of hCD34+ cells (hCD34+/hCD45+ cells) detected in mice at 16 weeks after mice were dosed (transplanted) with unedited or based-edited CD34+ cells that had been electroporated under small scale (OC400) or large scale (CL1.1) electroporation conditions and subjected to either 24 or 48+ hour pre-enrichment conditions. The bars and sets of bars in the graphs of FIGS. 24A-24D represent the cells and conditions as described above (mean+/−SEM, n=4-5).

[0185] FIGS. 25A-25C show bar graphs which present the results of assessing at 8 and 16 weeks post dosing chimerism, base editing and globin reactivation in unedited and base-edited cells administered to animals. FIG. 25A shows the percentage of human donor cell chimerism (hCD45+/(hCD45++mCD45+) in mouse bone marrow (BM) assessed at 8 weeks and 16 weeks after mice were dosed (transplanted) with unedited or based-edited CD34+ cells that had been electroporated under small scale (OC400) or large scale (CL1.1) electroporation conditions and subjected to either 24 or 48+ hour pre-enrichment conditions. FIG. 25B shows the percent of base editing at 8 and 16 weeks as assessed in unedited cells and base-edited cells as described. FIG. 25C shows the percent of gamma/beta globin-like fetal globin reactivation in the described unedited cells and base-edited cells at 16 weeks after dosing in animals. In FIGS. 25A-C, the bar graphs or sets of bar graphs represent the cells and conditions that are as described for the above drawings (e.g., the leftmost bar or the leftmost bar in the set of bars represents unedited cells, 48+ hours; the second to the left bar or the second bar to the left in the set of bars represents edited cells, 48+ hour, OC-400; the third to the left bar or the third bar to the left in the set of bars represents unedited cells, 24 hours; the fourth to the left bar or the fourth bar to the left in the set of bars represents edited cells, 24 hours, OC-400; and the fifth to the left bar or the fifth bar to the left in the set of bars represents edited cells, 24 hours, CL1.1).

[0186] FIG. 26 presents sets of bar graphs demonstrating the percent base editing in the cell subpopulations having the phenotypes and lineages shown (i.e., GlyA+, CD15+, CD19+, LIN-CD34+, BM) as assessed at 16 weeks post dosing of unedited or base edited cells into animals. The leftmost set of bars represents the % base editing in subpopulations of cells detected at 16 weeks after transplanting animals with unedited CD34+ cells (CD34+ cells isolated 24 hours from the time of collecting the human donor blood sample, “24 hr”). The middle set of bars represents the % base editing in subpopulations of cells detected at 16 weeks after transplanting animals with base-edited CD34+ cells subjected to small scale electroporation (OC-400) (CD34+ cells isolated 24 hours from the time of collecting the human donor blood sample, “24 hr”). The rightmost set of bars represents the % base editing in subpopulations of cells detected at 16 weeks after transplanting animals with base-edited CD34+ cells subjected to large scale electroporation (CL1.1) (CD34+ cells isolated 24 hours from the time of collecting the human donor blood sample, “24 hr”).

[0187] FIG. 27 presents a schematic illustration of a target site for editing the HBG1/2 locus. In the figure, the sequences from top to bottom are SEQ ID NOs: 289 and 290.

### DETAILED DESCRIPTION OF THE INVENTION

[0188] The invention features compositions containing novel adenine base editors (e.g., ABE8) that have increased efficiency and methods of using the compositions to generate modifications at target sites within nucleic acid molecules, in particular, with the treatment of hemoglobinopathies, such as sickle cell disease (SCD), anemia, thalassemia, etc.

[0189] Sickle cell disease (SCD) is a monogenic disorder affecting beta globin function, which leads to severe anemia and progressive multiple organ failure. A promising treatment for sickle cell disease (SCD) is the re-expression of fetal hemoglobin (HbF), which occurs naturally in individuals with hereditary persistence of fetal hemoglobin (HPFH). High levels of HbF are sometimes a result of β-globin gene deletions or point mutations in the promoters of the HbF genes. Sickle cell disease (SCD) patients harboring natural genetic variations in the human gamma globin gene promotors, HBG1 and HBG2 (HBG1/2), display elevated HbF levels and are typically afflicted with significantly fewer complications from sickle cell disease (SCD).

[0190] Featured herein are compositions and methods for long-term engraftment treatment with modified cells, e.g. hematopoietic cells modified, e.g., base-edited, with base editor systems as described herein. For example, a single nucleobase polymorphism (SNP) may be edited in hematopoietic stem cells or progenitor cells (HPSCs), e.g. human CD34⁺ cells, for engraftment in order to generate a desired treatment and/or phenotype. In some embodiments, base edited human CD34⁺ cells (donor cells) are engrafted into a recipient having sickle cell disease for the treatment of SCD. Base editing modifications may correct a mutation associated with sickle cell disease (SCD), or may create one or more nucleobase modifications that ameliorate sickle cell disease (SCD) symptoms. In some embodiments, modified human CD34⁺ hematopoietic stem/progenitor cells (HPSCs) are introduced into (e.g., engrafted) a subject in need thereof to generate increased and/or persistent expression of HbF. In some embodiments, base edited human CD34⁺ cells are introduced into (e.g., engrafted) a subject in need thereof for the treatment of sickle cell disease (SCD). In some embodiments, modified human CD34⁺ hematopoietic stem/progenitor cells (HPSCs) are introduced into (e.g., engrafted) a subject in need thereof to recreate an HPFH phenotype as a treatment for sickle cell disease (SCD).

[0191] In one aspect, the present disclosure provides nucleobase editor and base editor systems with improved base editing functions that generate a high percentage of nucleobase-edited cells, which become engrafted in a subject following delivery or administration to the subject. Following introduction into a subject, such base-edited cells become grafted and perform their functions as transplanted bone marrow cells. In certain embodiments, a base editor system provided herein effects editing at a single target nucleobase with increased editing efficiency, reduced off target effects, reduced indel formation, reduced bystander modifications, reduced spurious modifications, or a combination thereof.

### Base Editing at the HBG1/2 Locus

[0192] In some embodiments, the adenosine base editing system targeted for editing a hemoglobin gene or a regulatory element thereof provides base-edited cells that are advantageous for transplantation and engraftment in a subject in need thereof, e.g., a subject afflicted with a hemoglobinopathy, such as sickle cell disease or thalassemia. In some embodiments, the methods provide for editing human HBG1/2 gene promoters in HPSCs. In some embodiments, the method for editing a hemoglobin gene or a regulatory subunit thereof is an improved method over currently available methods for gene editing and for generating base edited cells that are suitable and beneficial for transplantation and engraftment. In some embodiments, the adenosine base editing system provided herein for editing a hemoglobin gene or a regulatory subunit thereof comprise one or more, or a combination of two or more, of the following advantages: higher editing efficiency; higher fidelity and significantly lower off-target editing events; higher survival of edited cells; higher persistence of edited cells in vitro; higher survival and persistence of edited cells in vivo; higher engraftment potential; higher ability to differentiate into erythropoietic lineage; higher proliferation capability in vitro, higher proliferation capability in vivo, higher expression of HbF; and higher reduction in a defective globin gene expression such as HbS, when compared to previously reported or existing base editing systems. In embodiments, the higher expression of HbF compensates for a hemoglobin deficiency in a subject. In embodiments, the hemoglobin deficiency is alpha thalassemia or beta thalassemia. Thalassemias are blood disorders characterized by decreased hemoglobin production. Thalessemia typically is associated with a deficiency in alpha and/or beta globin production in a subject.

[0193] In one aspect, the present disclosure provides a method for editing human HBG1/2 gene promoters in HPSCs for long-term engraftment potential in a subject having sickle cell disease (SCD). FIG. 27 illustrates a target sequence for editing human HBG1/2 gene promoters. In embodiments, editing the human HBG112 gene promoters disrupts and/or eliminates binding of BCL11A in the promoter region. In embodiments, editing the HBG1/2 gene promoter is associated with de-repression of the HBG1/2 gene. In embodiments, editing the HBG1/2 gene promoter abolishes, disrupts, or reduces BCL11A binding in the promoter region of the HBG1/2 gene. In embodiments, editing of human HBG1/2 gene results in a nucleobase change at position −144 relative to the canonical transcription start site of the HBG1/2 gene. In one embodiment, the present disclosure provides a method for editing human HBG1/2 gene promoters in HPSCs using an improved adenosine base editing system (ABE) for long-term engraftment potential in a subject having sickle cell disease (SCD). In some embodiments, several improvements are incorporated in the present disclosure for an improved adenosine base editing system that is targeted for editing a hemoglobin gene or a regulatory subunit thereof, such as, for example, editing human HBG1/2 gene promoters in HPSCs.

### HbB Gene Editing

[0194] In one aspect, the methods described herein are useful in HbB gene editing. In particular, the compositions and methods of the invention are useful for the treatment of sickle cell disease (SCD), which is caused by a Glu to Val mutation at the sixth amino acid of the β-globin protein encoded by the HbB gene. Despite many developments to date in the field of gene editing, precise correction of the diseased HhB gene to revert Val to Glu remains elusive, and is presently not achievable using either CRISPR/Cas nuclease or CRISPR/Cas base editing approaches.

[0195] Genome editing of the HbB gene to replace the affected nucleotide using a CRISPR/Cas nuclease approach requires cleavage of genomic DNA. However, cleavage of genomic DNA carries an increased risk of generating base insertions/deletions (indels), which have the potential to cause unintended and undesirable consequences, including generating premature stop codons, altering the codon reading frame, etc. Furthermore, generating double-stranded breaks at the beta globin β-globin) locus has the potential to radically alter the locus through recombination events. The beta-globin locus contains a cluster of globin genes having sequence identity to one another. Because of the structure of the beta-globin locus, recombination repair of a double-stranded break within the locus has the potential to result in gene loss of intervening sequences between globin genes, for example between gamma- and beta-globin genes. Unintended alterations to the locus also carry a risk of causing thalassemia. CRISPR/Cas base editing approaches hold promise in that they have the ability to generate precise alterations at the nucleobase level. However, precise correction of Val-Glu (GTG-GAG) requires a T⋅A to A⋅T transversion editor, which is not presently known to exist.

[0196] Additionally, the specificity of CRISPR/Cas base editing is due in part to a limited window of editable nucleotides created by R-loop formation upon CRISPR/Cas binding to DNA. Thus, CRISPR/Cas targeting must occur at or near the sickle cell site to allow base editing to be possible, and there may be additional sequence requirements for optimal editing within the window. One requirement for CRISPR/Cas targeting is the presence of a protospacer-adjacent motif (PAM) flanking the site to be targeted. For example, many base editors are based on SpCas9 which requires an NGG PAM. Even assuming hypothetically that a T⋅A to A⋅T transversion were possible, no NGG PAM exists that would place the target “A” at a desirable position for such an SpCas9 base editor. Although many new CRISPR/Cas proteins have been discovered or generated that expand the collection of available PAMs, PAM requirements remain a limiting factor in the ability to direct CRISPR/Cas base editors to specific nucleotides at any location in the genome.

[0197] The present invention is based, at least in part, on several discoveries described herein that address the foregoing challenges for providing a genome editing approach for treatment of sickle cell anemia. In one aspect, the invention is based in part on the ability to replace the valine at amino acid position 6, which causes sickle cell disease, with an alanine, to thereby generate an Hb variant (Hb Makassar) that does not generate a sickle cell phenotype. While precise correction (GTG-GAG) is not possible without a T⋅A to A⋅T transversion base editor, the studies performed herein have found that a Val-Ala (GTG-GCG) replacement (i.e., the Hb Makassar variant) can be generated using an A⋅T to G⋅C base editor (adenine base editor or ABE). This was achieved in part by the development of novel base editors and novel base editing strategies, as provided herein. For example, novel ABE base editors (i.e., having an adenosine deaminase domain) that utilize flanking sequences (e.g., PAM sequences; zinc finger binding sequences) for optimal base editing at the sickle cell target site.

[0198] Thus, the present invention includes compositions and methods for base editing a thymidine (T) to a cytidine (C) in the codon of the sixth amino acid of a sickle cell disease variant of the β-globin protein (Sickle HbS; E6V), thereby substituting an amino acid at position 6 of the β-globin protein for a valine (V6A or E6A) at this amino acid position. Substitution of alanine for valine at position 6 of HbS generates a β-globin protein variant that does not have a sickle cell phenotype (e.g., does not have the potential to polymerize as in the case of the pathogenic variant HbS). Accordingly, the compositions and methods of the invention are useful for the treatment of sickle cell disease (SCD).

[0199] In some embodiments, several improvements are incorporated in the present disclosure for an improved adenosine base editing system that is targeted for editing a hemoglobin gene or a regulatory subunit thereof. In some embodiments, the method provides for editing human HbB gene for generating a the Hb Makassar (E6A) variant in place of the Sickle HbS; E6V. In some embodiments, the improvements are useful in engraftment of the HbB edited hematopoietic stem cells.

[0200] In some embodiments, the target polynucleotide (DNA) sequence encodes a protein (e.g., HbB), and the gene edit is in a codon of the polynucleotide (DNA) sequence and results in a change in the amino acid encoded by the mutant codon as compared to the wild-type codon. In some embodiments, the deamination of a mutant A results in a change of the amino acid encoded by the mutant codon. In some embodiments, the deamination of the mutant C results in a change of the amino acid encoded by the mutant codon.

Guide RNA (gRNA) Sequences

[0201] To produce the gene edits described above, hematopoietic stem/progenitor cells (HPSCs) are collected from a subject and contacted with a guide RNA and a nucleobase editor polypeptide comprising a nucleic acid programmable DNA binding protein (napDNAbp) and a cytidine deaminase or adenosine deaminase. In some embodiments, multiple target sites are edited simultaneously. In some embodiments, editing the multiple target sites simultaneously comprises contacting the HPSCs with two or more gRNAs. In embodiments, the HPSCs are contacted with multiple distinct gRNAs, each targeting a different sequence. The guide RNA can be a single guide or a dual guide. In some embodiments, cells to be edited are contacted with at least one nucleic acid, wherein at least one nucleic acid encodes a guide RNA, or two or more guide RNAs, and a nucleobase editor polypeptide comprising a nucleic acid programmable DNA binding protein (napDNAbp) and a deaminase, e.g., an adenosine or a cytidine deaminase. In some embodiments, the gRNA comprises nucleotide analogs. These nucleotide analogs can inhibit degradation of the gRNA by cellular processes. An exemplary target sequence for base editing of the HBG1/2 promoter is CTTGACCAATAGCCTTGACAAGG-3′ (SEQ ID NO: 125), wherein AGG is the PAM sequence (see FIG. 27).

[0202] In some embodiments, a guide RNA provided herein directs the base editor to effect a nucleobase substitution in an HbB gene, thereby replacing a E6V mutation with a E6A substitution in a hemoglobin beta subunit encoded by the HbB gene. In some embodiments, the HbB gene comprises one or more mutations or SNPs associated with sickle cell disease, for example, a GAG-GTG substitution that results in the E6V amino acid mutation. Exemplary guide RNA sequences targeting the HbB gene include the nucleic acid sequences 5′-gsascsUUCUCCACAGGAGUCAGGGUUUUAGAGCUAGAAAUAGCAAGUUAAAAUAA GGCUAGUCCGUUAUUCAACUUGAAAAAGUGGCACCGAGUCGGUGCUsususu-3′ (SEQ ID NO: 126), 5′-ascsusUCUCCACAGGAGUCAGGGUUUUAGAGCUAGAAAUAGCAAGUUAAAAUAAG GCUAGUCCGUUAUUCAACUUGAAAAAGUGGCACCGAGUCGGUGCUsususu-3′ (SEQ ID NO: 127), or 5′-csususCUCCACAGGAGUCAGGGUUUUAGAGCUAGAAAUAGCAAGUUAAAAUAAGG CUAGUCCGUUAUUCAACUUGAAAAAGUGGCACCGAGUCGGUGCUsususu-3′ (SEQ ID NO: 128), wherein lowercase characters indicate 2′-O-methylated nucleobases, and “s” indicates phosphorothioates.

[0203] In some embodiments, a guide RNA provided herein directs the base editor to effect a nucleobase substitution in a promoter region of a HBG1/2 gene, thereby generating enhanced or elongated expression of hemoglobin gamma subunit and increased level of HbF. An exemplary guide RNA targeting the promoter region of an HBG1/2 gene is the nucleic acid sequence 5′-csususGACCAAUAGCCUUGACAGUUUUAGAGCUAGAAAUAGCAAGUUAAAAUAAG GCUAGUCCGUUAUCAACUUGAAAAAGUGGCACCGAGUCGGUGCUsususu-3′ (SEQ ID NO: 129), wherein lowercase characters indicate 2′-O-methylated nucleobases, and “s” indicates phosphorothioates.

[0204] Exemplary guide RNA spacer sequences and nucleobase changes are provided in Table 1 below.

TABLE 1
Introduction of Gene Regulator Edits

| gRNA | | | | | |
|---|---|---|---|---|---|
| Spacer | | | | | |
| SEQ | | Nucleotide | Base | | |
| ID NO | Gene | change | Editor | gRNA Spacer Sequence | PAM |
| 130 | HBG | c. -198 T > C | ABE | GUGGGGAAGGGGCCCCCAAG | AGG |
| | 1/2 | | | | |
| 131 | HBG | c. -198 T > C | ABE | AUUGAGAUAGUGUGGGGAAG | GGG |
| | 1/2 | | | | |
| 132 | HBG | c. -198 T > C | ABE | CAUUGAGAUAGUGUGGGGAA | GGG |
| | 1/2 | | | | |
| 133 | HBG | c. -198 T > C | ABE | GCAUUGAGAUAGUGUGGGGA | AGG |
| | 1/2 | | | | |
| 134 | HBG | c. -198 T > C | ABE | GUGGGGAAGGGGCCCCCAAG | AGG |
| | 1/2 | | | | |
| 135 | HBG | c. -114 ~ -102 | CBE | GCUAUUGGUCAAGGCAAGGC | TGG |
| | 1/2 | deletion | and/or | | |
| | | | ABE | | |
| 136 | HBG | c. -114 ~ -102 | CBE | CAAGGCUAUUGGUCAAGGCA | AGG |
| | 1/2 | deletion | and/or | | |
| | | | ABE | | |
| 137 | HBG | c. -114 ~ -102 | CBE | CUUGUCAAGGCUAUUGGUCA | AGG |
| | 1/2 | deletion | and/or | | |
| | | | ABE | | |
| 138 | HBG | c. -114 ~ -102 | CBE | CUUGACCAAUAGCCUUGACA | AGG |
| | 1/2 | deletion | and/or | | |
| | | | ABE | | |
| 139 | HBG | c. -114 ~ -102 | CBE | GUUUGCCUUGUCAAGGCUAU | TGG |
| | 1/2 | deletion | and/or | | |
| | | | ABE | | |
| 140 | HBG | c. -114 ~ -102 | CBE | UGGUCAAGUUUGCCUUGUCA | AGG |
| | 1/2 | deletion | and/or | | |
| | | | ABE | | |
| 141 | HBG | c. -198 T > C | ABE | UGGGGAAGGGGCCCCCAAGA | GGA |
| | 1/2 | | | | |
| 142 | HBG | c. -198 T > C | ABE | GUGUGGGGAAGGGGCCCCCA | AGA |
| | 1/2 | | | | |
| 143 | HBG | c. -175 T > C | ABE | UCAGACAGAUAUUUGCAUUG | AGA |
| | 1/2 | | | | |
| 144 | HBG | c. -175 T > C | ABE | UUUCAGACAGAUAUUUGCAU | TGA |
| | 1/2 | | | | |
| 145 | HBG | c. -114 ~ -102 | CBE | CUUGCCUUGACCAAUAGCCU | TGA |
| | 1/2 | deletion | and/or | | |
| | | | ABE | | |
| 146 | HBG | c. -114 ~ -102 | CBE | UAGCCUUGACAAGGCAAACU | TGA |
| | 1/2 | deletion | and/or | | |
| | | | ABE | | |
| 147 | HBG | c. -90 BCL11A | CBE | CAAACUUGACCAAUAGUCUU | AGA |
| | 1/2 | binding | and/or | | |
| | | | ABE | | |
| 148 | HBG | c. -198 T > C | ABE | UGUGGGGAAGGGGCCCCCAA | GAGGAT |
| | 1/2 | | | | |
| 149 | HBG | c. -202 C > T, -201 | CBE | GGGCCCCUUCCCCACACUAU | CTCAAT |
| | 1/2 | C > T, -198 T > C, | and/or | | |
| | | -197 C > T, -196 | ABE | | |
| | | C > T, -195 C > G | | | |
| 150 | HBG | c. -175 T > C | ABE | CAGACAGAUAUUUGCAUUGA | GATAGT |
| | 1/2 | | | | |
| 151 | HBG | c. -175 T > C | ABE | UUUCAGACAGAUAUUUGCAU | TGAGAT |
| | 1/2 | | | | |
| 152 | HBG | c. -114 ~ -102 | CBE | GCCUUGACAAGGCAAACUUG | ACCAAT |
| | 1/2 | deletion | and/or | | |
| | | | ABE | | |
| 153 | HBG | c. -114 ~ -102 | CBE | UUGACAAGGCAAACUUGACC | AATAGT |
| | 1/2 | deletion | and/or | | |
| | | | ABE | | |
| 154 | HBG | c. -90 BCL11A | CBE | UGACCAAUAGUCUUAGAGUA | TCCAGT |
| | 1/2 | binding | and/or | | |
| | | | ABE | | |
| 155 | HBG | c. -175 T > C | ABE | AGACAGAUAUUUGCAUUGAGAUA | TTT |
| | 1/2 | | | | |

[0205] In some embodiments, any of the fusion proteins provided herein may have a Cas9 domain that does not have nuclease activity (dCas9), or a Cas9 domain that cuts one strand of a duplexed DNA molecule, referred to as a Cas9 nickase (nCas9). Without wishing to be bound by any particular theory, the presence of the catalytic residue (e.g., H840) maintains the activity of the Cas9 to cleave the non-edited (e.g., non-methylated) strand opposite the targeted nucleobase. Mutation of the catalytic residue (e.g., D10 to A10) prevents cleavage of the edited strand containing the targeted A residue. Such Cas9 variants can generate a single-strand DNA break (nick) at a specific location based on the gRNA-defined target sequence, leading to repair of the non-edited strand, ultimately resulting in a nucleobase change on the non-edited strand.

[0206] Base editors of the invention can be used for targeted editing of DNA in vitro or in vivo. In non-limiting examples, base editors of the invention are used for the generation of mutant cells or animals, for the correction of genetic defects in cells ex vivo (such as in cells obtained from a subject that are subsequently re-introduced into the same or another subject), or for the introduction of targeted mutations in vivo (e.g., the correction of genetic defects or the introduction of deactivating mutations in disease-associated genes in a G to A, or a T to C to mutation).

### Nucleobase Editors

[0207] Useful in the methods and compositions described herein are nucleobase editors that edit, modify or alter a target nucleotide sequence of a polynucleotide. Nucleobase editors described herein typically include a polynucleotide programmable nucleotide binding domain and a nucleobase editing domain (e.g., adenosine deaminase or cytidine deaminase). A polynucleotide programmable nucleotide binding domain, when in conjunction with a bound guide polynucleotide (e.g., gRNA), can specifically bind to a target polynucleotide sequence and thereby localize the base editor to the target nucleic acid sequence desired to be edited.

### Polynucleotide Programmable Nucleotide Binding Domain

[0208] Polynucleotide programmable nucleotide binding domains bind polynucleotides (e.g., RNA, DNA). A polynucleotide programmable nucleotide binding domain of a base editor can itself comprise one or more domains (e.g., one or more nuclease domains). In some embodiments, the nuclease domain of a polynucleotide programmable nucleotide binding domain can comprise an endonuclease or an exonuclease. An endonuclease can cleave a single strand of a double-stranded nucleic acid or both strands of a double-stranded nucleic acid molecule. In some embodiments, a nuclease domain of a polynucleotide programmable nucleotide binding domain can cut zero, one, or two strands of a target polynucleotide.

[0209] Non-limiting examples of a polynucleotide programmable nucleotide binding domain which can be incorporated into a base editor include a CRISPR protein-derived domain, a restriction nuclease, a meganuclease, TAL nuclease (TALEN), and a zinc finger nuclease (ZFN). In some embodiments, a base editor comprises a polynucleotide programmable nucleotide binding domain comprising a natural or modified protein or portion thereof which via a bound guide nucleic acid is capable of binding to a nucleic acid sequence during CRISPR (i.e., Clustered Regularly Interspaced Short Palindromic Repeats)-mediated modification of a nucleic acid. Such a protein is referred to herein as a “CRISPR protein.” Accordingly, disclosed herein is a base editor comprising a polynucleotide programmable nucleotide binding domain comprising all or a portion of a CRISPR protein (i.e. a base editor comprising as a domain all or a portion of a CRISPR protein, also referred to as a “CRISPR protein-derived domain” of the base editor). A CRISPR protein-derived domain incorporated into a base editor can be modified compared to a wild-type or natural version of the CRISPR protein. For example, as described below a CRISPR protein-derived domain can comprise one or more mutations, insertions, deletions, rearrangements and/or recombinations relative to a wild-type or natural version of the CRISPR protein.

[0210] Cas proteins that can be used herein include class 1 and class 2. Non-limiting examples of Cas proteins include Cas1, Cas1B, Cas2, Cas3, Cas4, Cas5, Cas5d, Cas5t, Cas5h, Cas5a, Cas6, Cas7, Cas8, Cas9 (also known as Csn1 or Csx12), Cas10, Csy1, Csy2, Csy3, Csy4, Cse1, Cse2, Cse3, Cse4, Cse5e, Csc1, Csc2, Csa5, Csn1, Csn2, Csm1, Csm2, Csm3, Csm4, Csm5, Csm6, Cmr1, Cmr3, Cmr4, Cmr5, Cmr6, Csb1, Csb2, Csb3, Csx17, Csx14, Csx10, Csx16, CsaX, Csx3, Csx1, Csx1S, Csf1, Csf2, CsO, Csf4, Csd1, Csd2, Cst1, Cst2, Csh1, Csh2, Csa1, Csa2, Csa3, Csa4, Csa5, Cas12a/Cpf1, Cas12b/C2c1 (e.g., SEQ ID NO: 156), Cas12c/C2c3, Cas12d/CasY, Cas12e/CasX, Cas12g, Cas12h, Cas12i, and Cas12j/CasΦD, CARF, DinG, homologues thereof, or modified versions thereof. A CRISPR enzyme can direct cleavage of one or both strands at a target sequence, such as within a target sequence and/or within a complement of a target sequence. For example, a CRISPR enzyme can direct cleavage of one or both strands within about 1, 2, 3, 4, 5, 6, 7, 8, 9, 10, 15, 20, 25, 50, 100, 200, 500, or more base pairs from the first or last nucleotide of a target sequence.

[0211] A vector that encodes a CRISPR enzyme that is mutated to with respect, to a corresponding wild-type enzyme such that the mutated CRISPR enzyme lacks the ability to cleave one or both strands of a target polynucleotide containing a target sequence can be used. A Cas protein (e.g., Cas9, Cas12) or a Cas domain (e.g., Cas9, Cas12) can refer to a polypeptide or domain with at least or at least about 50%, 60%, 70%, 80%, 90%, 91%, 92%, 93%, 94%, 95%, 96%, 97%, 98%, 99%, or 100% sequence identity and/or sequence homology to a wild-type exemplary Cas polypeptide or Cas domain. Cas (e.g., Cas9, Cas12) can refer to the wild-type or a modified form of the Cas protein that can comprise an amino acid change such as a deletion, insertion, substitution, variant, mutation, fusion, chimera, or any combination thereof.

[0212] In some embodiments, a CRISPR protein-derived domain of a base editor can include all or a portion of Cas9 from Corynebacterium ulcerans (NCBI Refs: NC_015683.1, NC_017317.1); Corynebacterium diphtheria (NCBI Refs: NC_016782.1, NC_016786.1); Spiroplasma syrphidicola (NCBI Ref: NC_021284.1); Prevotella intermedia (NCBI Ref: NC_017861.1); Spiroplasma taiwanense (NCBI Ref: NC_021846.1); Streptococcus iniae (NCBI Ref: NC_021314.1); Belliella baltica (NCBI Ref: NC_018010.1); Psychroflexus torquis (NCBI Ref: NC_018721.1); Streptococcus thermophilus (NCBI Ref: YP_820832.1); Listeria innocua (NCBI Ref: NP_472073.1); Campylobacter jejuni (NCBI Ref: YP_002344900.1); Neisseria meningitidis (NCBI Ref: YP_002342100.1), Streptococcus pyogenes, or Staphylococcus aureus.

[0213] Cas9 nuclease sequences and structures are well known to those of skill in the art (See, e.g., “Complete genome sequence of an M1 strain of Streptococcus pyogenes.” Ferretti et al., Proc. Natl. Acad. Sci. U.S.A. 98:4658-4663(2001); “CRISPR RNA maturation by trans-encoded small RNA and host factor RNase III.” Deltcheva E., et al., Nature 471:602-607(2011); and “A programmable dual-RNA-guided DNA endonuclease in adaptive bacterial immunity.” Jinek M., et al., Science 337:816-821(2012), the entire contents of each of which are incorporated herein by reference). Cas9 orthologs have been described in various species, including, but not limited to, S. pyogenes and S. thermophilus. Additional suitable Cas9 nucleases and sequences will be apparent to those of skill in the art based on this disclosure, and such Cas9 nucleases and sequences include Cas9 sequences from the organisms and loci disclosed in Chylinski, Rhun, and Charpentier, “The tracrRNA and Cas9 families of type II CRISPR-Cas immunity systems” (2013) RNA Biology 10:5, 726-737; the entire contents of which are incorporated herein by reference.

[0214] High Fidelity Cas9 Domains

[0215] Some aspects of the disclosure provide high fidelity Cas9 domains. High fidelity Cas9 domains are known in the art and described, for example, in Kleinstiver, B. P., et al. “High-fidelity CRISPR-Cas9 nucleases with no detectable genome-wide off-target effects.” Nature 529, 490-495 (2016); and Slaymaker, I. M., et al. “Rationally engineered Cas9 nucleases with improved specificity.” Science 351, 84-88 (2015); the entire contents of each of which are incorporated herein by reference. An Exemplary high fidelity Cas9 domain is provided in the Sequence Listing as SEQ ID NO: 157. In some embodiments, high fidelity Cas9 domains are engineered Cas9 domains comprising one or more mutations that decrease electrostatic interactions between the Cas9 domain and the sugar-phosphate backbone of a DNA, relative to a corresponding wild-type Cas9 domain. High fidelity Cas9 domains that have decreased electrostatic interactions with the sugar-phosphate backbone of DNA have less off-target effects. In some embodiments, the Cas9 domain (e.g., a wild type Cas9 domain (SEQ ID NOs: 93 and 158) comprises one or more mutations that decrease the association between the Cas9 domain and the sugar-phosphate backbone of a DNA. In some embodiments, a Cas9 domain comprises one or more mutations that decreases the association between the Cas9 domain and the sugar-phosphate backbone of DNA by at least 1%, at least 2%, at least 3%, at least 4%, at least 5%, at least 10%, at least 15%, at least 20%, at least 25%, at least 30%, at least 35%, at least 40%, at least 45%, at least 50%, at least 55%, at least 60%, at least 65%, or at least 70%.

[0216] In some embodiments, any of the Cas9 fusion proteins provided herein comprise one or more of a D10A, N497X, a R661X, a Q695X, and/or a Q926X mutation, or a corresponding mutation in any of the amino acid sequences provided herein, wherein X is any amino acid. In some embodiments, the high fidelity Cas9 enzyme is SpCas9(K855A), eSpCas9(1.1), SpCas9-HF1, or hyper accurate Cas9 variant (HypaCas9). In some embodiments, the modified Cas9 eSpCas9(1.1) contains alanine substitutions that weaken the interactions between the HNH/RuvC groove and the non-target DNA strand, preventing strand separation and cutting at off-target sites. Similarly, SpCas9-HF1 lowers off-target editing through alanine substitutions that disrupt Cas9's interactions with the DNA phosphate backbone. HypaCas9 contains mutations (SpCas9 N692A/M694A/Q695A/H698A) in the REC3 domain that increase Cas9 proofreading and target discrimination. All three high fidelity enzymes generate less off-target editing than wildtype Cas9.

[0217] Cas9 Domains with Reduced Exclusivity

[0218] Typically, Cas9 proteins, such as Cas9 from S. pyogenes (spCas9), require a “protospacer adjacent motif (PAM)” or PAM-like motif, which is a 2-6 base pair DNA sequence immediately following the DNA sequence targeted by the Cas9 nuclease in the CRISPR bacterial adaptive immune system. The presence of an NGG PAM sequence is required to bind a particular nucleic acid region, where the “N” in “NGG” is adenosine (A), thymidine (T), or cytosine (C), and the G is guanosine. This may limit the ability to edit desired bases within a genome. In some embodiments, the base editing fusion proteins provided herein may need to be placed at a precise location, for example a region comprising a target base that is upstream of the PAM. See e.g., Komor, A. C., et al., “Programmable editing of a target base in genomic DNA without double-stranded DNA cleavage” Nature 533, 420-424 (2016), the entire contents of which are hereby incorporated by reference. Exemplary polypeptide sequences for spCas9 proteins capable of binding a PAM sequence are provided in the Sequence Listing as SEQ ID NOs: 158-161 Accordingly, in some embodiments, any of the fusion proteins provided herein may contain a Cas9 domain that is capable of binding a nucleotide sequence that does not contain a canonical (e.g., NGG) PAM sequence. Cas9 domains that bind to non-canonical PAM sequences have been described in the art and would be apparent to the skilled artisan. For example, Cas9 domains that bind non-canonical PAM sequences have been described in Kleinstiver, B. P., et al., “Engineered CRISPR-Cas9 nucleases with altered PAM specificities” Nature 523, 481-485 (2015); and Kleinstiver, B. P., et al., “Broadening the targeting range of Staphylococcus aureus CRISPR-Cas9 by modifying PAM recognition” Nature Biotechnology 33, 1293-1298 (2015); the entire contents of each are hereby incorporated by reference.

[0219] Nickases

[0220] In some embodiments, the polynucleotide programmable nucleotide binding domain can comprise a nickase domain. Herein the term “nickase” refers to a polynucleotide programmable nucleotide binding domain comprising a nuclease domain that is capable of cleaving only one strand of the two strands in a duplexed nucleic acid molecule (e.g., DNA). In some embodiments, a nickase can be derived from a fully catalytically active (e.g., natural) form of a polynucleotide programmable nucleotide binding domain by introducing one or more mutations into the active polynucleotide programmable nucleotide binding domain. For example, where a polynucleotide programmable nucleotide binding domain comprises a nickase domain derived from Cas9, the Cas9-derived nickase domain can include a D10A mutation and a histidine at position 840. In such embodiments, the residue H840 retains catalytic activity and can thereby cleave a single strand of the nucleic acid duplex. In another example, a Cas9-derived nickase domain can comprise an H840A mutation, while the amino acid residue at position 10 remains a D. In some embodiments, a nickase can be derived from a fully catalytically active (e.g., natural) form of a polynucleotide programmable nucleotide binding domain by removing all or a portion of a nuclease domain that is not required for the nickase activity. For example, where a polynucleotide programmable nucleotide binding domain comprises a nickase domain derived from Cas9, the Cas9-derived nickase domain can comprise a deletion of all or a portion of the RuvC domain or the HNH domain.

[0221] In some embodiments, wild-type Cas9 corresponds to, or comprises the following amino acid sequence:

(SEQ ID NO: 158)
MDKKYSIGLDIGTNSVGWAVITDEYKVPSKKFKVLGNTDRHSIKKNLIGALLFDSGETAEATRIK
RTARRRYTRRKNRICYLQEIFSNEMAKVDDSFFHRLEESFLVEEDKKHERHPIFGNIVDEVAYHE
KYPTIYHLRKKLVDSTDKADLRLIYLALAHMIKFRGHFLIEGDLNPDNSDVDKLFIQLVQTYNQL
FEENPINASGVDAKAILSARLSKSRRLENLIAQLPGEKKNGLFGNLIALSLGLTPNFKSNFDLAED
AKLQLSKDTYDDDLDNLLAQIGDQYADLFLAAKNLSDAILLSDILRVNTEITKAPLSASMIKRYD
EHHQDLTLLKALVRQQLPEKYKEIFFDQSKNGYAGYIDGGASQEEFYKFIKPILEKMDGTEELLV
KLNREDLLRKQRTFDNGSIPHQIHIGEIHAILRRQEDFYPFLKDNREKIEKIITFRIPYYVGPLARG
NSRFAWMTRKSEETITPWNFEEVVDKGASAQSFIERMTNFDKNLPNEKVLPKHSLLYEYFTVYN
ELTKVKYVTEGMRKPAFLSGEQKKAIVDLLFKTNRKVTVKQLKEDYFKKIECFDSVEISGVEDRF
NASLGTYHDLLKIIKDKDFLDNEENEDILEDIVLTLTLFEDREMIEERLKTYAHLFDDKVMKQLK
RRRYTGWGRLSRKLINGIRDKQSGKTILDFLKSDGFANRNFMQLIHDDSLTFKEDIQKAQVSGQG
DSLHEHIANLAGSPAIKKGILQTVKVVDELVKVMGRHKPENIVIEMARENQTTQKGQKNSRERM
KRIEEGIKELGSQILKEHPVENTQLQNEKLYLYYLQNGRDMYVDQELDINRLSDYDVDHIVPQSF
LKDDSIDNKVLTRSDKNRGKSDNVPSEEVVKKMKNYWRQLLNAKLITQRKFDNLTKAERGGLS
ELDKAGFIKRQLVETRQITKHVAQILDSRMNTKYDENDKLIREVKVITLKSKLVSDFRKDFQFYK
VREINNYHHAHDAYLNAVVGTALIKKYPKLESEFVYGDYKVYDVRKMIAKSEQEIGKATAKYF
FYSNIMNFFKTEITLANGEIRKRPLIETNGETGEIVWDKGRDFATVRKVLSMPQVNIVKKTEVQT
GGFSKESILPKRNSDKLIARKKDWDPKKYGGFDSPTVAYSVLVVAKVEKGKSKKLKSVKELLGI
TIMERSSFEKNPIDFLEAKGYKEVKKDLIIKLPKYSLFELENGRKRMLASAGELQKGNELALPSKY
VNFLYLASHYEKLKGSPEDNEQKQLFVEQHKHYLDEIEQISEFSKRVILADANLDKVLSAYNKH
RDKPIREQAENIIHLFTLTNLGAPAAFKYFDTTIDRKRYTSTKEVLDATLIHQSITGLYETRIDLSQL
GGD (single underline: HNH domain; double underline: RuvC domain).

[0222] Throughout the disclosure, the initial methionine of a polypeptide sequence (e.g., the wild-type-Cas9 sequence provided immediately above) is omitted in some embodiments where the polypeptide sequence is incorporated into a base editor and/or a fusion protein.

[0223] In some embodiments, the strand of a nucleic acid duplex target polynucleotide sequence that is cleaved by a base editor comprising a nickase domain (e.g., Cas9-derived nickase domain, Cas12-derived nickase domain) is the strand that is not edited by the base editor (i.e., the strand that is cleaved by the base editor is opposite to a strand comprising a base to be edited). In other embodiments, a base editor comprising a nickase domain (e.g., Cas9-derived nickase domain, Cas12-derived nickase domain) can cleave the strand of a DNA molecule which is being targeted for editing. In such embodiments, the non-targeted strand is not cleaved.

[0224] In some embodiments, a Cas9 nuclease has an inactive (e.g., an inactivated) DNA cleavage domain, that is, the Cas9 is a nickase, referred to as an “nCas9” protein (for “nickase” Cas9). The Cas9 nickase may be a Cas9 protein that is capable of cleaving only one strand of a duplexed nucleic acid molecule (e.g., a duplexed DNA molecule). In some embodiments the Cas9 nickase cleaves the target strand of a duplexed nucleic acid molecule, meaning that the Cas9 nickase cleaves the strand that is base paired to (complementary to) a gRNA (e.g., an sgRNA) that is bound to the Cas9. In some embodiments, a Cas9 nickase comprises a D10A mutation and has a histidine at position 840. In some embodiments the Cas9 nickase cleaves the non-target, non-base-edited strand of a duplexed nucleic acid molecule, meaning that the Cas9 nickase cleaves the strand that is not base paired to a gRNA (e.g., an sgRNA) that is bound to the Cas9. In some embodiments, a Cas9 nickase comprises an H840A mutation and has an aspartic acid residue at position 10, or a corresponding mutation. In some embodiments the Cas9 nickase comprises an amino acid sequence that is at least 60%, at least 65%, at least 70%, at least 75%, at least 80%, at least 85%, at least 90%, at least 95%, at least 96%, at least 97%, at least 98%, at least 99%, or at least 99.5% identical to any one of the Cas9 nickases provided herein. Additional suitable Cas9 nickases will be apparent to those of skill in the art based on this disclosure and knowledge in the field, and are within the scope of this disclosure.

[0225] The amino acid sequence of an exemplary catalytically active Cas9 nickase (nCas9) is as follows:

(SEQ ID NO: 94)
MDKKYSIGLAIGTNSVGWAVITDEYKVPSKKFKVLGNTDRHSIKKNLIGALLFDSGETAE
ATRLKRTARRRYTRRKNRICYLQEIFSNEMAKVDDSFFHRLEESFLVEEDKKHERHPIFGNIVDEV
AYHEKYPTIYHLRKKLVDSTDKADLRLIYLALAHMIKFRGHFLIEGDLNPDNSDVDKLFIQLVQT
YNQLFEENPINASGVDAKAILSARLSKSRRLENLIAQLPGEKKNGLFGNLIALSLGLTPNFKSNFD
LAEDAKLQLSKDTYDDDLDNLLAQIGDQYADLFLAAKNLSDAILLSDILRVNTEITKAPLSASMI
KRYDEHHQDLTLLKALVRQQLPEKYKEIFFDQSKNGYAGYIDGGASQEEFYKFIKPILEKMDGTE
ELLVKLNREDLLRKQRTFDNGSIPHQIHLGELHAILRRQEDFYPFLKDNREKIEKILTFRIPYYVGP
LARGNSRFAWMTRKSEETITPWNFEEVVDKGASAQSFIERMTNFDKNLPNEKVLPKHSLLYEYF
TVYNELTKVKYVTEGMRKPAFLSGEQKKAIVDLLFKTNRKVTVKQLKEDYFKKIECFDSVEISG
VEDRFNASLGTYHDLLKIIKDKDFLDNEENEDILEDIVLTLTLFEDREMIEERLKTYAHLFDDKVM
KQLKRRRYTGWGRLSRKLINGIRDKQSGKTILDFLKSDGFANRNFMQLIHDDSLTFKEDIQKAQV
SGQGDSLHEHIANLAGSPAIKKGILQTVKVVDELVKVMGRHKPENIVIEMARENQTTQKGQKNS
RERMKRIEEGIKELGSQILKEHPVENTQLQNEKLYLYYLQNGRDMYVDQELDINRLSDYDVDHI
VPQSFLKDDSIDNKVLTRSDKNRGKSDNVPSEEVVKKMKNYWRQLLNAKLITQRKFDNLTKAE
RGGLSELDKAGFIKRQLVETRQITKHVAQILDSRMNTKYDENDKLIREVKVITLKSKLVSDFRKD
FQFYKVREINNYHHAHDAYLNAVVGTALIKKYPKLESEFVYGDYKVYDVRKMIAKSEQEIGKA
TAKYFFYSNIMNFFKTEITLANGEIRKRPLIETNGETGEIVWDKGRDFATVRKVLSMPQVNIVKKT
EVQTGGFSKESILPKRNSDKLIARKKDWDPKKYGGFDSPTVAYSVLVVAKVEKGKSKKLKSVKE
LLGITIMERSSFEKNPIDFLEAKGYKEVKKDLIIKLPKYSLFELENGRKRMLASAGELQKGNELAL
PSKYVNFLYLASHYEKLKGSPEDNEQKQLFVEQHKHYLDEIIEQISEFSKRVILADANLDKVLSA
YNKHRDKPIREQAENIIHLFTLTNLGAPAAFKYFDTTIDRKRYTSTKEVLDATLIHQSITGLYETRI
DLSQLGGD

[0226] The Cas9 nuclease has two functional endonuclease domains: RuvC and HNH. Cas9 undergoes a conformational change upon target binding that positions the nuclease domains to cleave opposite strands of the target DNA. The end result of Cas9-mediated DNA cleavage is a double-strand break (DSB) within the target DNA (˜3-4 nucleotides upstream of the PAM sequence). The resulting DSB is then repaired by one of two general repair pathways: (1) the efficient but error-prone non-homologous end joining (NHEJ) pathway; or (2) the less efficient but high-fidelity homology directed repair (HDR) pathway.

[0227] The “efficiency” of non-homologous end joining (NHEJ) and/or homology directed repair (HDR) can be calculated by any convenient method. For example, in some embodiments, efficiency can be expressed in terms of percentage of successful HDR. For example, a surveyor nuclease assay can be used to generate cleavage products and the ratio of products to substrate can be used to calculate the percentage. For example, a surveyor nuclease enzyme can be used that directly cleaves DNA containing a newly integrated restriction sequence as the result of successful HDR. More cleaved substrate indicates a greater percent HDR (a greater efficiency of HDR). As an illustrative example, a fraction (percentage) of HDR can be calculated using the following equation [(cleavage products)/(substrate plus cleavage products)] (e.g., (b+c)/(a+b+c), where “a” is the band intensity of DNA substrate and “b” and “c” are the cleavage products). In some embodiments, efficiency can be expressed in terms of percentage of successful NHEJ. For example, a T7 endonuclease I assay can be used to generate cleavage products and the ratio of products to substrate can be used to calculate the percentage NHEJ. T7 endonuclease I cleaves mismatched heteroduplex DNA which arises from hybridization of wild-type and mutant DNA strands (NHEJ generates small random insertions or deletions (indels) at the site of the original break). More cleavage indicates a greater percent NHEJ (a greater efficiency of NHEJ). As an illustrative example, a fraction (percentage) of NHEJ can be calculated using the following equation: (1−(1−(b+c)/(a+b+c))^{1/2})×100, where “a” is the band intensity of DNA substrate and “b” and “c” are the cleavage products (Ran et. al., Cell. 2013 Sep. 12; 154(6):1380-9; and Ran et al., Nat Protoc. 2013 November; 8(11): 2281-2308).

[0228] The NHEJ repair pathway is the most active repair mechanism, and it frequently causes small nucleotide insertions or deletions (indels) at the DSB site. The randomness of NHEJ-mediated DSB repair has important practical implications, because a population of cells expressing Cas9 and a gRNA or a guide polynucleotide can result in a diverse array of mutations. In most embodiments, NHEJ gives rise to small indels in the target DNA that result in amino acid deletions, insertions, or frameshift mutations leading to premature stop codons within the open reading frame (ORF) of the targeted gene. The ideal end result is a loss-of-function mutation within the targeted gene.

[0229] While NHEJ-mediated DSB repair often disrupts the open reading frame of the gene, homology directed repair (HDR) can be used to generate specific nucleotide changes ranging from a single nucleotide change to large insertions like the addition of a fluorophore or tag. In order to utilize HDR for gene editing, a DNA repair template containing the desired sequence can be delivered into the cell type of interest with the gRNA(s) and Cas9 or Cas9 nickase. The repair template can contain the desired edit as well as additional homologous sequence immediately upstream and downstream of the target (termed left & right homology arms). The length of each homology arm can be dependent on the size of the change being introduced, with larger insertions requiring longer homology arms. The repair template can be a single-stranded oligonucleotide, double-stranded oligonucleotide, or a double-stranded DNA plasmid. The efficiency of HDR is generally low (<10% of modified alleles) even in cells that express Cas9, gRNA and an exogenous repair template. The efficiency of HDR can be enhanced by synchronizing the cells, since HDR takes place during the S and G2 phases of the cell cycle. Chemically or genetically inhibiting genes involved in NHEJ can also increase HDR frequency. In some embodiments, Cas9 is a modified Cas9. A given gRNA targeting sequence can have additional sites throughout the genome where partial homology exists. These sites are called off-targets and need to be considered when designing a gRNA. In addition to optimizing gRNA design, CRISPR specificity can also be increased through modifications to Cas9. Cas9 generates double-strand breaks (DSBs) through the combined activity of two nuclease domains, RuvC and HNH. Cas9 nickase, a D10A mutant of SpCas9, retains one nuclease domain and generates a DNA nick rather than a DSB. The nickase system can also be combined with HDR-mediated gene editing for specific gene edits.

[0230] Catalytically Dead Nucleases

[0231] Also provided herein are base editors comprising a polynucleotide programmable nucleotide binding domain which is catalytically dead (i.e., incapable of cleaving a target polynucleotide sequence). Herein the terms “catalytically dead” and “nuclease dead” are used interchangeably to refer to a polynucleotide programmable nucleotide binding domain which has one or more mutations and/or deletions resulting in its inability to cleave a strand of a nucleic acid. In some embodiments, a catalytically dead polynucleotide programmable nucleotide binding domain base editor can lack nuclease activity as a result of specific point mutations in one or more nuclease domains. For example, in the case of a base editor comprising a Cas9 domain, the Cas9 can comprise both a D10A mutation and an H840A mutation. Such mutations inactivate both nuclease domains, thereby resulting in the loss of nuclease activity. In other embodiments, a catalytically dead polynucleotide programmable nucleotide binding domain can comprise one or more deletions of all or a portion of a catalytic domain (e.g., RuvC1 and/or HNH domains). In further embodiments, a catalytically dead polynucleotide programmable nucleotide binding domain comprises a point mutation (e.g., D10A or H840A) as well as a deletion of all or a portion of a nuclease domain. dCas9 domains are known in the art and described, for example, in Qi et al., “Repurposing CRISPR as an RNA-guided platform for sequence-specific control of gene expression.” Cell. 2013; 152(5):1173-83, the entire contents of which are incorporated herein by reference.

[0232] Additional suitable nuclease-inactive dCas9 domains will be apparent to those of skill in the art based on this disclosure and knowledge in the field, and are within the scope of this disclosure. Such additional exemplary suitable nuclease-inactive Cas9 domains include, but are not limited to, D10A/H840A, D10A/D839A/H840A, and D10A/D839A/H840A/N863A mutant domains (See, e.g., Prashant et al., CAS9 transcriptional activators for target specificity screening and paired nickases for cooperative genome engineering. Nature Biotechnology. 2013; 31(9): 833-838, the entire contents of which are incorporated herein by reference).

[0233] In some embodiments, dCas9 corresponds to, or comprises in part or in whole, a Cas9 amino acid sequence having one or more mutations that inactivate the Cas9 nuclease activity. In some embodiments, the nuclease-inactive dCas9 domain comprises a DIOX mutation and a H840X mutation of the amino acid sequence set forth herein, or a corresponding mutation in any of the amino acid sequences provided herein, wherein X is any amino acid change. In some embodiments, the nuclease-inactive dCas9 domain comprises a D10A mutation and a H840A mutation of the amino acid sequence set forth herein, or a corresponding mutation in any of the amino acid sequences provided herein. In some embodiments, a nuclease-inactive Cas9 domain comprises the amino acid sequence set forth in Cloning vector pPlatTET-gRNA2 (Accession No. BAV54124).

[0234] In some embodiments, a variant Cas9 protein can cleave the complementary strand of a guide target sequence but has reduced ability to cleave the non-complementary strand of a double stranded guide target sequence. For example, the variant Cas9 protein can have a mutation (amino acid substitution) that reduces the function of the RuvC domain. As a non-limiting example, in some embodiments, a variant Cas9 protein has a D10A (aspartate to alanine at amino acid position 10) and can therefore cleave the complementary strand of a double stranded guide target sequence but has reduced ability to cleave the non-complementary strand of a double stranded guide target sequence (thus resulting in a single strand break (SSB) instead of a double strand break (DSB) when the variant Cas9 protein cleaves a double stranded target nucleic acid) (see, for example, Jinek et al., Science. 2012 Aug. 17; 337(6096):816-21).

[0235] In some embodiments, a variant Cas9 protein can cleave the non-complementary strand of a double stranded guide target sequence but has reduced ability to cleave the complementary strand of the guide target sequence. For example, the variant Cas9 protein can have a mutation (amino acid substitution) that reduces the function of the HNH domain (RuvC/HNH/RuvC domain motifs). As a non-limiting example, in some embodiments, the variant Cas9 protein has an H840A (histidine to alanine at amino acid position 840) mutation and can therefore cleave the non-complementary strand of the guide target sequence but has reduced ability to cleave the complementary strand of the guide target sequence (thus resulting in a SSB instead of a DSB when the variant Cas9 protein cleaves a double stranded guide target sequence). Such a Cas9 protein has a reduced ability to cleave a guide target sequence (e.g., a single stranded guide target sequence) but retains the ability to bind a guide target sequence (e.g., a single stranded guide target sequence).

[0236] As another non-limiting example, in some embodiments, the variant Cas9 protein harbors W476A and W1126A mutations such that the polypeptide has a reduced ability to cleave a target DNA. Such a Cas9 protein has a reduced ability to cleave a target DNA (e.g., a single stranded target DNA) but retains the ability to bind a target DNA (e.g., a single stranded target DNA).

[0237] As another non-limiting example, in some embodiments, the variant Cas9 protein harbors P475A, W476A, N477A, D1125A, W1126A, and D1127A mutations such that the polypeptide has a reduced ability to cleave a target DNA. Such a Cas9 protein has a reduced ability to cleave a target DNA (e.g., a single stranded target DNA) but retains the ability to bind a target DNA (e.g., a single stranded target DNA).

[0238] As another non-limiting example, in some embodiments, the variant Cas9 protein harbors H840A, W476A, and W1126A, mutations such that the polypeptide has a reduced ability to cleave a target DNA. Such a Cas9 protein has a reduced ability to cleave a target DNA (e.g., a single stranded target DNA) but retains the ability to bind a target DNA (e.g., a single stranded target DNA). As another non-limiting example, in some embodiments, the variant Cas9 protein harbors H840A, D10A, W476A, and W1126A, mutations such that the polypeptide has a reduced ability to cleave a target DNA. Such a Cas9 protein has a reduced ability to cleave a target DNA (e.g., a single stranded target DNA) but retains the ability to bind a target DNA (e.g., a single stranded target DNA). In some embodiments, the variant Cas9 has restored catalytic His residue at position 840 in the Cas9 HNH domain (A840H).

[0239] As another non-limiting example, in some embodiments, the variant Cas9 protein harbors, H840A, P475A, W476A, N477A, D1125A, W1126A, and D1127A mutations such that the polypeptide has a reduced ability to cleave a target DNA. Such a Cas9 protein has a reduced ability to cleave a target DNA (e.g., a single stranded target DNA) but retains the ability to bind a target DNA (e.g., a single stranded target DNA). As another non-limiting example, in some embodiments, the variant Cas9 protein harbors D10A, H840A, P475A, W476A, N477A, D1125A, W1126A, and D1127A mutations such that the polypeptide has a reduced ability to cleave a target DNA. Such a Cas9 protein has a reduced ability to cleave a target DNA (e.g., a single stranded target DNA) but retains the ability to bind a target DNA (e.g., a single stranded target DNA). In some embodiments, when a variant Cas9 protein harbors W476A and W1126A mutations or when the variant Cas9 protein harbors P475A, W476A, N477A, D1125A, W1126A, and D1127A mutations, the variant Cas9 protein does not bind efficiently to a PAM sequence. Thus, in some such embodiments, when such a variant Cas9 protein is used in a method of binding, the method does not require a PAM sequence. In other words, in some embodiments, when such a variant Cas9 protein is used in a method of binding, the method can include a guide RNA, but the method can be performed in the absence of a PAM sequence (and the specificity of binding is therefore provided by the targeting segment of the guide RNA). Other residues can be mutated to achieve the above effects (i.e., inactivate one or the other nuclease portions). As non-limiting examples, residues D10, G12, G17, E762, H840, N854, N863, H982, H983, A984, D986, and/or A987 can be altered (i.e., substituted). Also, mutations other than alanine substitutions are suitable.

[0240] In some embodiments, a variant Cas9 protein that has reduced catalytic activity (e.g., when a Cas9 protein has a D10, G12, G17, E762, H840, N854, N863, H982, H983, A984, D986, and/or a A987 mutation, e.g., D10A, G12A, G17A, E762A, H840A, N854A, N863A, H982A, H983A, A984A, and/or D986A), the variant Cas9 protein can still bind to target DNA in a site-specific manner (because it is still guided to a target DNA sequence by a guide RNA) as long as it retains the ability to interact with the guide RNA.

[0241] In some embodiments, the variant Cas protein can be spCas9, spCas9-VRQR, spCas9-VRER, xCas9 (sp), saCas9, saCas9-KKH, spCas9-MQKSER, spCas9-LRKIQK, or spCas9-LRVSQL.

[0242] In some embodiments, the Cas9 domain is a Cas9 domain from Staphylococcus aureus (SaCas9). In some embodiments, the SaCas9 domain is a nuclease active SaCas9, a nuclease inactive SaCas9 (SaCas9d), or a SaCas9 nickase (SaCas9n). In some embodiments, the SaCas9 comprises a N579A mutation, or a corresponding mutation in any of the Cas9 or SaCas9 amino acid sequences provided in the Sequence Listing submitted herewith.

[0243] In some embodiments, the SaCas9 domain, the SaCas9d domain, or the SaCas9n domain can bind to a nucleic acid sequence having a non-canonical PAM. In some embodiments, the SaCas9 domain, the SaCas9d domain, or the SaCas9n domain can bind to a nucleic acid sequence having a NNGRRT or a NNGRRV PAM sequence. In some embodiments, the SaCas9 domain comprises one or more of a E781X, a N967X, and a R1014X mutation, or a corresponding mutation in any of the amino acid sequences provided herein, wherein X is any amino acid. In some embodiments, the SaCas9 domain comprises one or more of a E781K, a N967K, and a R1014H mutation, or one or more corresponding mutation in any of the amino acid sequences provided herein. In some embodiments, the SaCas9 domain comprises a E781K, a N967K, or a R1014H mutation, or corresponding mutations in any of the amino acid sequences provided herein.

[0244] In some embodiments, one of the Cas9 domains present in the fusion protein may be replaced with a guide nucleotide sequence-programmable DNA-binding protein domain that has no requirements for a PAM sequence. In some embodiments, the Cas9 is an SaCas9. Residue A579 of SaCas9 can be mutated from N579 to yield a SaCas9 nickase. Residues K781, K967, and H1014 can be mutated from E781, N967, and R1014 to yield a SaKKH Cas9.

[0245] In some embodiments, a modified SpCas9 including amino acid substitutions D1135M, S1136Q, G1218K, E1219F, A1322R, D1332A, R1335E, and T1337R (SpCas9-MQKFRAER) and having specificity for the altered PAM 5′-NGC-3′ was used.

[0246] Alternatives to S. pyogenes Cas9 can include RNA-guided endonucleases from the Cpf1 family that display cleavage activity in mammalian cells. CRISPR from Prevotella and Francisella 1 (CRISPR/Cpf1) is a DNA-editing technology analogous to the CRISPR/Cas9 system. Cpf1 is an RNA-guided endonuclease of a class II CRISPR/Cas system. This acquired immune mechanism is found in Prevotella and Francisella bacteria. Cpf1 genes are associated with the CRISPR locus, coding for an endonuclease that use a guide RNA to find and cleave viral DNA. Cpf1 is a smaller and simpler endonuclease than Cas9, overcoming some of the CRISPR/Cas9 system limitations. Unlike Cas9 nucleases, the result of Cpf1-mediated DNA cleavage is a double-strand break with a short 3′ overhang. Cpf1′ s staggered cleavage pattern can open up the possibility of directional gene transfer, analogous to traditional restriction enzyme cloning, which can increase the efficiency of gene editing. Like the Cas9 variants and orthologues described above, Cpf1 can also expand the number of sites that can be targeted by CRISPR to AT-rich regions or AT-rich genomes that lack the NGG PAM sites favored by SpCas9. The Cpf1 locus contains a mixed alpha/beta domain, a RuvC-I followed by a helical region, a RuvC-II and a zinc finger-like domain. The Cpf1 protein has a RuvC-like endonuclease domain that is similar to the RuvC domain of Cas9.

[0247] Furthermore, Cpf1, unlike Cas9, does not have a HNH endonuclease domain, and the N-terminal of Cpf1 does not have the alpha-helical recognition lobe of Cas9. Cpf1 CRISPR-Cas domain architecture shows that Cpf1 is functionally unique, being classified as Class 2, type V CRISPR system. The Cpf1 loci encode Cas1, Cas2 and Cas4 proteins that are more similar to types I and III than type II systems. Functional Cpf1 does not require the trans-activating CRISPR RNA (tracrRNA), therefore, only CRISPR (crRNA) is required. This benefits genome editing because Cpf1 is not only smaller than Cas9, but also it has a smaller sgRNA molecule (approximately half as many nucleotides as Cas9). The Cpf1-crRNA complex cleaves target DNA or RNA by identification of a protospacer adjacent motif 5′-YTN-3′ or 5′-TTN-3′ in contrast to the G-rich PAM targeted by Cas9. After identification of PAM, Cpf1 introduces a sticky-end-like DNA double-stranded break having an overhang of 4 or 5 nucleotides.

[0248] In some embodiments, the Cas9 is a Cas9 variant having specificity for an altered PAM sequence. In some embodiments, the Additional Cas9 variants and PAM sequences are described in Miller, S. M., el al. Continuous evolution of SpCas9 variants compatible with non-G PAMs, Nat. Biotechnol. (2020), the entirety of which is incorporated herein by reference. in some embodiments, a Cas9 variate have no specific PAM requirements. In some embodiments, a Cas9 variant, e.g. a SpCas9 variant has specificity for a NRNH PAM, wherein R is A or G and H is A, C, or T. In some embodiments, the SpCas9 variant has specificity for a PAM sequence AAA, TAA, CAA, GAA, TAT, GAT, or CAC. In some embodiments, the SpCas9 variant comprises an amino acid substitution at position 1114, 1134, 1135, 1137, 1139, 1151, 1180, 1188, 1211, 1218, 1219, 1221, 1249, 1256, 1264, 1290, 1318, 1317, 1320, 1321, 1323, 1332, 1333, 1335, 1337, or 1339 or a corresponding position thereof. In some embodiments, the SpCas9 variant comprises an amino acid substitution at position 1114, 1135, 1218, 1219, 1221, 1249, 1320, 1321, 1323, 1332, 1333, 1335, or 1337 or a corresponding position thereof. In some embodiments, the SpCas9 variant comprises an amino acid substitution at position 1114, 1134, 1135, 1137, 1139, 1151, 1180, 1188, 1211, 1219, 1221, 1256, 1264, 1290, 1318, 1317, 1320, 1323, 1333 or a corresponding position thereof. In some embodiments, the SpCas9 variant comprises an amino acid substitution at position 1114, 1131, 1135, 1150, 1156, 1180, 1191, 1218, 1219, 1221, 1227, 1249, 1253, 1286, 1293, 1320, 1321, 1332, 1335, 1339 or a corresponding position thereof. In some embodiments, the SpCas9 variant comprises an amino acid substitution at position 1114, 1127, 1135, 1180, 1207, 1219, 1234, 1286, 1301, 1332, 1335, 1337, 1338, 1349 or a corresponding position thereof. Exemplary amino acid substitutions and PAM specificity of SpCas9 variants are shown in Tables 2A-2B and 3.

TABLE 2A
SpCas9 Variants

| | SpCas9 amino acid position | | | | | | | | | | | | |
|---|---|---|---|---|---|---|---|---|---|---|---|---|---|
| | 1114 | 1135 | 1218 | 1219 | 1221 | 1249 | 1320 | 1321 | 1323 | 1332 | 1333 | 1335 | 1337 |
| SpCas9 | R | D | G | E | Q | P | A | P | A | D | R | R | T |
| AAA | | N | | V | H | | | | | | G | | |
| AAA | | N | | V | H | | | | | | G | | |
| AAA | | | | V | | | | | | | G | | |
| TAA | G | N | | V | | | | | | | I | | |
| TAA | | N | | V | | | | | | | I | | A |
| TAA | G | N | | V | | | | | | | I | | A |
| CAA | | | | V | | | | | | | K | | |
| CAA | | N | | V | | | | | | | K | | |
| CAA | | N | | V | | | | | | | K | | |
| GAA | | | | V | H | | V | | | | K | | |
| GAA | | N | | V | | | V | | | | K | | |
| GAA | | | | V | H | | V | | | | K | | |
| TAT | | | S | V | H | S | | S | | | | L | |
| TAT | | | S | V | H | S | | S | | | | L | |
| TAT | | | S | V | H | S | | S | | | | L | |
| GAT | | | | V | | | | | | | I | | |
| GAT | | | | V | | | | | D | | | Q | |
| GAT | | | | V | | | | | D | | | Q | |
| CAC | | | | V | | | | | | N | | Q | N |
| CAC | | N | | V | | | | | | | | Q | N |
| CAC | | | | V | | | | | | N | | Q | N |

TABLE 2B

| | SpCas9 amino acid position | | | | | | | | | | | | | | | | | | |
|---|---|---|---|---|---|---|---|---|---|---|---|---|---|---|---|---|---|---|---|
| | 1114 | 1134 | 1135 | 1137 | 1139 | 1151 | 1180 | 1188 | 1211 | 1219 | 1221 | 1256 | 1264 | 1290 | 1318 | 1317 | 1320 | 1323 | 1333 |
| SpCas9 | R | F | D | P | V | K | D | K | K | E | Q | Q | H | V | L | N | A | A | R |
| GAA | | | | | | | | | | V | H | | | | | | V | | K |
| GAA | | | N | S | | | | | | V | | | | | | | V | D | K |
| GAA | | | N | | | | | | | V | H | | Y | | | | V | | K |
| CAA | | | N | | | | | | | V | H | | Y | | | | V | | K |
| CAA | G | | N | S | | | | | | V | H | | Y | | | | V | | K |
| CAA | | | N | | | | | R | | V | H | | | | | | V | | K |
| CAA | | | N | | | | G | | R | V | H | | Y | | | | V | | K |
| CAA | | | N | | | | | | | V | H | | Y | | | | V | | K |
| AAA | | | N | | | | G | | | V | H | R | Y | | | | V | D | K |
| CAA | G | | N | | | | G | | | V | H | | Y | | | | V | D | K |
| CAA | | L | N | | | | G | | | V | H | | Y | | | T | V | D | K |
| TAA | G | | N | | | | G | | | V | H | | Y | G | S | | V | D | K |
| TAA | G | | N | | | E | G | | | V | H | | Y | | S | | V | | K |
| TAA | G | | N | | | | G | | | V | H | | Y | | S | | V | D | K |
| TAA | G | | N | | | | G | | R | V | H | | | | | | V | | K |
| TAA | | | N | | | | G | | R | V | H | | Y | | | | V | | K |
| TAA | G | | N | | A | | G | | | V | H | | | | | | V | | K |
| TAA | G | | N | | | | | | | V | H | | | | | | V | | K |

TABLE 2C

| | SpCas9 amino acid position | | | | | | | | | | | | | | | | | | | |
|---|---|---|---|---|---|---|---|---|---|---|---|---|---|---|---|---|---|---|---|---|
| | 1114 | 1131 | 1135 | 1150 | 1156 | 1180 | 1191 | 1218 | 1219 | 1221 | 1227 | 1249 | 1253 | 1286 | 1293 | 1320 | 1321 | 1332 | 1335 | 1339 |
| SpCas9 | R | Y | D | E | K | D | K | G | E | Q | A | P | E | N | A | A | P | D | R | T |
| SacB.TAT | | | N | | | | N | | V | H | | | | | | V | S | | L | |
| SacB.TAT | | | N | | | | | S | V | H | | S | | | | | S | G | L | |
| AAT | | | N | | | | | S | V | H | V | S | | K | T | | S | G | L | I |
| TAT | G | | N | | | G | | S | V | H | | S | K | | | | S | G | L | |
| TAT | G | | N | | | G | | S | V | H | | S | | | | | S | G | L | |
| TAT | G | C | N | | | G | | S | V | H | | S | | | | | S | G | L | |
| TAT | G | C | N | | | G | | S | V | H | | S | | | | | S | G | L | |
| TAT | G | C | N | | | G | | S | V | H | | S | | | | | S | G | L | |
| TAT | G | C | N | | E | G | | S | V | H | | S | | | | | S | G | L | |
| TAT | G | C | N | V | | G | | S | V | H | | S | | | | | S | G | L | |
| TAT | | c | N | | | G | | S | V | H | | S | | | | | S | G | L | |
| TAT | G | C | N | | | G | | S | V | H | | S | | | | | S | G | L | |

TABLE 3

| | SpCas9 amino acid position | | | | | | | | | | | | | |
|---|---|---|---|---|---|---|---|---|---|---|---|---|---|---|
| | 1114 | 1127 | 1135 | 1180 | 1207 | 1219 | 1234 | 1286 | 1301 | 1332 | 1335 | 1337 | 1338 | 1349 |
| SpCas9 | R | D | D | D | E | E | N | N | P | D | R | T | S | H |
| SacB. | | | N | | | V | | | | N | Q | N | | |
| CAC | | | | | | | | | | | | | | |
| AAC | G | | N | | | V | | | | N | Q | N | | |
| AAC | G | | N | | | V | | | | N | Q | N | | |
| TAC | G | | N | | | V | | | | N | Q | N | | |
| TAC | G | | N | | | V | | H | | N | Q | N | | |
| TAC | G | | N | | G | V | D | H | | N | Q | N | | |
| TAC | G | | N | | | V | | | | N | Q | N | | |
| TAC | G | G | N | E | | V | | H | | N | Q | N | | |
| TAC | G | | N | | | V | | H | | N | Q | N | | |
| TAC | G | | N | | | V | | | | N | Q | N | T | R |

[0249] In some embodiments, the nucleic acid programmable DNA binding protein (napDNAbp) is a single effector of a microbial CRISPR-Cas system. Single effectors of microbial CRISPR-Cas systems include, without limitation, Cas9, Cpf1, Cas12b/C2c1, and Cas12c/C2c3. Typically, microbial CRISPR-Cas systems are divided into Class 1 and Class 2 systems. Class 1 systems have multisubunit effector complexes, while Class 2 systems have a single protein effector. For example, Cas9 and Cpf1 are Class 2 effectors. In addition to Cas9 and Cpf1, three distinct Class 2 CRISPR-Cas systems (Cas12b/C2c1, and Cas12c/C2c3) have been described by Shmakov et al., “Discovery and Functional Characterization of Diverse Class 2 CRISPR Cas Systems”, Mol. Cell, 2015 Nov. 5; 60(3): 385-397, the entire contents of which is hereby incorporated by reference. Effectors of two of the systems, Cas12b/C2c1, and Cas12c/C2c3, contain RuvC-like endonuclease domains related to Cpf1. A third system contains an effector with two predicated HEPN RNase domains. Production of mature CRISPR RNA is tracrRNA-independent, unlike production of CRISPR RNA by Cas12b/C2c1. Cas12b/C2c1 depends on both CRISPR RNA and tracrRNA for DNA cleavage.

[0250] In some embodiments, the napDNAbp is a circular permutant (e.g., SEQ ID NO: 163).

[0251] The crystal structure of Alicyclobaccillus acidoterrastris Cas12b/C2c1 (AacC2c1) has been reported in complex with a chimeric single-molecule guide RNA (sgRNA). See e.g., Liu et al., “C2c1-sgRNA Complex Structure Reveals RNA-Guided DNA Cleavage Mechanism”, Mol. Cell. 2017 Jan. 19; 65(2):310-322, the entire contents of which are hereby incorporated by reference. The crystal structure has also been reported in Alicyclobacillus acidoterrestris C2c1 bound to target DNAs as ternary complexes. See e.g., Yang et al., “PAM-dependent Target DNA Recognition and Cleavage by C2C1 CRISPR-Cas endonuclease”, Cell, 2016 Dec. 15; 167(7):1814-1828, the entire contents of which are hereby incorporated by reference. Catalytically competent conformations of AacC2c1, both with target and non-target DNA strands, have been captured independently positioned within a single RuvC catalytic pocket, with Cas12b/C2c1-mediated cleavage resulting in a staggered seven-nucleotide break of target DNA. Structural comparisons between Cas12b/C2c1 ternary complexes and previously identified Cas9 and Cpf1 counterparts demonstrate the diversity of mechanisms used by CRISPR-Cas9 systems.

[0252] In some embodiments, the nucleic acid programmable DNA binding protein (napDNAbp) of any of the fusion proteins provided herein may be a Cas12b/C2c1, or a Cas12c/C2c3 protein. In some embodiments, the napDNAbp is a Cas12b/C2c1 protein. In some embodiments, the napDNAbp is a Cas12c/C2c3 protein. In some embodiments, the napDNAbp comprises an amino acid sequence that is at least 85%, at least 90%, at least 91%, at least 92%, at least 93%, at least 94%, at least 95%, at least 96%, at least 97%, at least 98%, at least 99%, or at ease 99.5% identical to a naturally-occurring Cas12b/C2c1 or Cas12c/C2c3 protein. In some embodiments, the napDNAbp is a naturally-occurring Cas12b/C2c1 or Cas12c/C2c3 protein. In some embodiments, the napDNAbp comprises an amino acid sequence that is at least 85%, at least 90%, at least 91%, at least 92%, at least 93%, at least 94%, at least 95%, at least 96%, at least 97%, at least 98%, at least 99%, or at ease 99.5% identical to any one of the napDNAbp sequences provided herein. It should be appreciated that Cas12b/C2c1 or Cas12c/C2c3 from other bacterial species may also be used in accordance with the present disclosure.

[0253] In some embodiments, a napDNAbp refers to Cas12c. In some embodiments, the Cas12c protein is a Cas12c1 (SEQ ID NO: 164) or a variant of Cas12c1. In some embodiments, the Cas12 protein is a Cas12c2 (SEQ ID NO: 165) or a variant of Cas12c2. In some embodiments, the Cas12 protein is a Cas12c protein from Oleiphilus sp. HI0009 (i.e., OspCas12c; SEQ ID NO: 166) or a variant of OspCas12c. These Cas12c molecules have been described in Yan et al., “Functionally Diverse Type V CRISPR-Cas Systems,” Science, 2019 Jan. 4; 363: 88-91; the entire contents of which is hereby incorporated by reference. In some embodiments, the napDNAbp comprises an amino acid sequence that is at least 85%, at least 90%, at least 91%, at least 92%, at least 93%, at least 94%, at least 95%, at least 96%, at least 97%, at least 98%, at least 99%, or at least 99.5% identical to a naturally-occurring Cas12c1, Cas12c2, or OspCas12c protein. In some embodiments, the napDNAbp is a naturally-occurring Cas12c1, Cas12c2, or OspCas12c protein. In some embodiments, the napDNAbp comprises an amino acid sequence that is at least 85%, at least 90%, at least 91%, at least 92%, at least 93%, at least 94%, at least 95%, at least 96%, at least 97%, at least 98%, at least 99%, or at ease 99.5% identical to any Cas12c1, Cas12c2, or OspCas12c protein described herein. It should be appreciated that Cas12c1, Cas12c2, or OspCas12c from other bacterial species may also be used in accordance with the present disclosure.

[0254] In some embodiments, a napDNAbp refers to Cas12g, Cas12h, or Cas12i, which have been described in, for example, Yan et al., “Functionally Diverse Type V CRISPR-Cas Systems,” Science, 2019 Jan. 4; 363: 88-91; the entire contents of each is hereby incorporated by reference. Exemplary Cas12g, Cas12h, and Cas12i polypeptide sequences are provided in the Sequence Listing as SEQ ID NOs: 167-170. By aggregating more than 10 terabytes of sequence data, new classifications of Type V Cas proteins were identified that showed weak similarity to previously characterized Class V protein, including Cas12g, Cas12h, and Cas12i. In some embodiments, the Cas12 protein is a Cas12g or a variant of Cas12g. In some embodiments, the Cas12 protein is a Cas12h or a variant of Cas12h. In some embodiments, the Cas12 protein is a Cas12i or a variant of Cas12i. It should be appreciated that other RNA-guided DNA binding proteins may be used as a napDNAbp, and are within the scope of this disclosure. In some embodiments, the napDNAbp comprises an amino acid sequence that is at least 85%, at least 90%, at least 91%, at least 92%, at least 93%, at least 94%, at least 95%, at least 96%, at least 97%, at least 98%, at least 99%, or at least 99.5% identical to a naturally-occurring Cas12g, Cas12h, or Cas12i protein. In some embodiments, the napDNAbp is a naturally-occurring Cas12g, Cas12h, or Cas12i protein. In some embodiments, the napDNAbp comprises an amino acid sequence that is at least 85%, at least 90%, at least 91%, at least 92%, at least 93%, at least 94%, at least 95%, at least 96%, at least 97%, at least 98%, at least 99%, or at ease 99.5% identical to any Cas12g, Cas12h, or Cas12i protein described herein. It should be appreciated that Cas12g, Cas12h, or Cas12i from other bacterial species may also be used in accordance with the present disclosure. In some embodiments, the Cas12i is a Cas12i1 or a Cas12i2.

[0255] In some embodiments, the nucleic acid programmable DNA binding protein (napDNAbp) of any of the fusion proteins provided herein may be a Cas12j/CasΦ protein. Cas12j/CasΦ is described in Pausch el al., “CRISPR-Cas4 from huge phages is a hypercompact genome editor,” Science, 17 Jul. 2020, Vol. 369, Issue 6501, pp. 333-337, which is incorporated herein by reference in its entirety. In some embodiments, the napDNAbp comprises an amino acid sequence that is at least 85%, at least 90%, at least 91%, at least 92%, at least 93%, at least 94%, at least 95%, at least 96%, at least 97%, at least 98%, at least 99%, or at ease 99.5% identical to a naturally-occurring Cas12j/CasΦ protein. In some embodiments, the napDNAbp is a naturally-occurring Cas12j/CasΦ protein. In some embodiments, the napDNAbp is a nuclease inactive (“dead”) Cas12j/CasΦ protein. It should be appreciated that Cas12j/CasΦ from other species may also be used in accordance with the present disclosure.

Fusion Proteins with Internal Insertion

[0256] Provided herein are fusion proteins comprising a heterologous polypeptide fused to a nucleic acid programmable nucleic acid binding protein, for example, a napDNAbp. A heterologous polypeptide can be a polypeptide that is not found in the native or wild-type napDNAbp polypeptide sequence. The heterologous polypeptide can be fused to the napDNAbp at a C-terminal end of the napDNAbp, an N-terminal end of the napDNAbp, or inserted at an internal location of the napDNAbp. In some embodiments, the heterologous polypeptide is a deaminase (e.g., cytidine or adenosine deaminase) or a functional fragment thereof. For example, a fusion protein can comprise a deaminase flanked by an N-terminal fragment and a C-terminal fragment of a Cas9 or Cas12 (e.g., Cas12b/C2c1), polypeptide. In some embodiments, the cytidine deaminase is an APOBEC deaminase (e.g., APOBEC1). In some embodiments, the adenosine deaminase is a TadA (e.g., TadA*7.10 or TadA*8). In some embodiments, the TadA is a TadA*8 or a TadA*9. TadA sequences (e.g., TadA7.10 or TadA*8) as described herein are suitable deaminases for the above-described fusion proteins.

[0257] In some embodiments, the fusion protein comprises the structure:

NH2-[N-terminal fragment of a napDNAbp]-[deaminase]-[C-terminal fragment of a napDNAbp]-COOH;
NH2-[N-terminal fragment of a Cas9]-[adenosine deaminase]-[C-terminal fragment of a Cas9]-COOH;
NH2-[N-terminal fragment of a Cas12]-[adenosine deaminase]-[C-terminal fragment of a Cas12]-COOH;
NH2-[N-terminal fragment of a Cas9]-[cytidine deaminase]-[C-terminal fragment of a Cas9]-COOH;
NH2-[N-terminal fragment of a Cas12]-[cytidine deaminase]-[C-terminal fragment of a Cas12]-COOH;
where each instance of “]-[” is an optional linker.

[0258] The deaminase can be a circular permutant deaminase. For example, the deaminase can be a circular permutant adenosine deaminase. In some embodiments, the deaminase is a circular permutant TadA, circularly permutated at amino acid residue 116, 136, or 65 as numbered in the TadA reference sequence.

[0259] The fusion protein can comprise more than one deaminase. The fusion protein can comprise, for example, 1, 2, 3, 4, 5 or more deaminases. In some embodiments, the fusion protein comprises one or two deaminase. The two or more deaminases in a fusion protein can be an adenosine deaminase, a cytidine deaminase, or a combination thereof. The two or more deaminases can be homodimers or heterodimers. The two or more deaminases can be inserted in tandem in the napDNAbp. In some embodiments, the two or more deaminases may not be in tandem in the napDNAbp.

[0260] In some embodiments, the napDNAbp in the fusion protein is a Cas9 polypeptide or a fragment thereof. The Cas9 polypeptide can be a variant Cas9 polypeptide. In some embodiments, the Cas9 polypeptide is a Cas9 nickase (nCas9) polypeptide or a fragment thereof. In some embodiments, the Cas9 polypeptide is a nuclease dead Cas9 (dCas9) polypeptide or a fragment thereof. The Cas9 polypeptide in a fusion protein can be a full-length Cas9 polypeptide. In some cases, the Cas9 polypeptide in a fusion protein may not be a full length Cas9 polypeptide. The Cas9 polypeptide can be truncated, for example, at a N-terminal or C-terminal end relative to a naturally-occurring Cas9 protein. The Cas9 polypeptide can be a circularly permuted Cas9 protein. The Cas9 polypeptide can be a fragment, a portion, or a domain of a Cas9 polypeptide, that is still capable of binding the target polynucleotide and a guide nucleic acid sequence.

[0261] In some embodiments, the Cas9 polypeptide is a Streptococcus pyogenes Cas9 (SpCas9), Staphylococcus aureus Cas9 (SaCas9), Streptococcus thermophilus 1 Cas9 (St1Cas9), or fragments or variants of any of the Cas9 polypeptides described herein.

[0262] In some embodiments, the fusion protein comprises an adenosine deaminase domain and a cytidine deaminase domain inserted within a Cas9. In some embodiments, an adenosine deaminase is fused within a Cas9 and a cytidine deaminase is fused to the C-terminus. In some embodiments, an adenosine deaminase is fused within Cas9 and a cytidine deaminase fused to the N-terminus. In some embodiments, a cytidine deaminase is fused within Cas9 and an adenosine deaminase is fused to the C-terminus. In some embodiments, a cytidine deaminase is fused within Cas9 and an adenosine deaminase fused to the N-terminus.

[0263] Exemplary structures of a fusion protein with an adenosine deaminase and a cytidine deaminase and a Cas9 are provided as follows: NH2-[Cas9(adenosine deaminase)]-[cytidine deaminase]-COOH; NH2-[cytidine deaminase]-[Cas9(adenosine deaminase)]-COOH; NH2-[Cas9(cytidine deaminase)]-[adenosine deaminase]-COOH; or NH2-[adenosine deaminase]-[Cas9(cytidine deaminase)]-COOH.

[0264] In some embodiments, the “-” used in the general architecture above indicates the presence of an optional linker.

[0265] In various embodiments, the catalytic domain has DNA modifying activity (e.g., deaminase activity), such as adenosine deaminase activity. In some embodiments, the adenosine deaminase is a TadA (e.g., TadA*7.10). In some embodiments, the TadA is a TadA*8. In some embodiments, a TadA*8 is fused within Cas9 and a cytidine deaminase is fused to the C-terminus. In some embodiments, a TadA*8 is fused within Cas9 and a cytidine deaminase fused to the N-terminus. In some embodiments, a cytidine deaminase is fused within Cas9 and a TadA*8 is fused to the C-terminus. In some embodiments, a cytidine deaminase is fused within Cas9 and a TadA*8 fused to the N-terminus. Exemplary structures of a fusion protein with a TadA*8 and a cytidine deaminase and a Cas9 are provided as follows: NH2-[Cas9(TadA*8)]-[cytidine deaminase]-COOH; NH2-[cytidine deaminase]-[Cas9(TadA*8)]-COOH; NH2-[Cas9(cytidine deaminase)]-[TadA*8]-COOH; or NH2-[TadA*8]-[Cas9(cytidine deaminase)]-COOH.

[0266] In some embodiments, the “-” used in the general architecture above indicates the presence of an optional linker.

[0267] The heterologous polypeptide (e.g., deaminase) can be inserted in the napDNAbp (e.g., Cas9 or Cas12 (e.g., Cas12b/C2c1)) at a suitable location, for example, such that the napDNAbp retains its ability to bind the target polynucleotide and a guide nucleic acid. A deaminase (e.g., adenosine deaminase, cytidine deaminase, or adenosine deaminase and cytidine deaminase) can be inserted into a napDNAbp without compromising function of the deaminase (e.g., base editing activity) or the napDNAbp (e.g., ability to bind to target nucleic acid and guide nucleic acid). A deaminase (e.g., adenosine deaminase, cytidine deaminase, or adenosine deaminase and cytidine deaminase) can be inserted in the napDNAbp at, for example, a disordered region or a region comprising a high temperature factor or B-factor as shown by crystallographic studies. Regions of a protein that are less ordered, disordered, or unstructured, for example solvent exposed regions and loops, can be used for insertion without compromising structure or function. A deaminase (e.g., adenosine deaminase, cytidine deaminase, or adenosine deaminase and cytidine deaminase) can be inserted in the napDNAbp in a flexible loop region or a solvent-exposed region. In some embodiments, the deaminase (e.g., adenosine deaminase, cytidine deaminase, or adenosine deaminase and cytidine deaminase) is inserted in a flexible loop of the Cas9 or the Cas12b/C2c1 polypeptide.

[0268] In some embodiments, the insertion location of a deaminase (e.g., adenosine deaminase, cytidine deaminase, or adenosine deaminase and cytidine deaminase) is determined by B-factor analysis of the crystal structure of Cas9 polypeptide. In some embodiments, the deaminase (e.g., adenosine deaminase, cytidine deaminase, or adenosine deaminase and cytidine deaminase) is inserted in regions of the Cas9 polypeptide comprising higher than average B-factors (e.g., higher B factors compared to the total protein or the protein domain comprising the disordered region). B-factor or temperature factor can indicate the fluctuation of atoms from their average position (for example, as a result of temperature-dependent atomic vibrations or static disorder in a crystal lattice). A high B-factor (e.g., higher than average B-factor) for backbone atoms can be indicative of a region with relatively high local mobility. Such a region can be used for inserting a deaminase without compromising structure or function. A deaminase (e.g., adenosine deaminase, cytidine deaminase, or adenosine deaminase and cytidine deaminase) can be inserted at a location with a residue having a Ca atom with a B-factor that is 50%, 60%, 70%, 80%, 90%, 100%, 110%, 120%, 130%, 140%, 150%, 160%, 170%, 180%, 190%, 200%, or greater than 200% more than the average B-factor for the total protein. A deaminase (e.g., adenosine deaminase, cytidine deaminase, or adenosine deaminase and cytidine deaminase) can be inserted at a location with a residue having a Ca atom with a B-factor that is 50%, 60%, 70%, 80%, 90%, 100%, 110%, 120%, 130%, 140%, 150%, 160%, 170%, 180%, 190%, 200% or greater than 200% more than the average B-factor for a Cas9 protein domain comprising the residue. Cas9 polypeptide positions comprising a higher than average B-factor can include, for example, residues 768, 792, 1052, 1015, 1022, 1026, 1029, 1067, 1040, 1054, 1068, 1246, 1247, and 1248 as numbered in the Cas9 reference sequence. Cas9 polypeptide regions comprising a higher than average B-factor can include, for example, residues 792-872, 792-906, and 2-791 as numbered in the Cas9 reference sequence (SEQ ID NO: 158).

[0269] A heterologous polypeptide (e.g., deaminase) can be inserted in the napDNAbp at an amino acid residue selected from the group consisting of: 768, 791, 792, 1015, 1016, 1022, 1023, 1026, 1029, 1040, 1052, 1054, 1067, 1068, 1069, 1246, 1247, and 1248 as numbered in the Cas9 reference sequence, or a corresponding amino acid residue in another Cas9 polypeptide. In some embodiments, the heterologous polypeptide is inserted between amino acid positions 768-769, 791-792, 792-793, 1015-1016, 1022-1023, 1026-1027, 1029-1030, 1040-1041, 1052-1053, 1054-1055, 1067-1068, 1068-1069, 1247-1248, or 1248-1249 as numbered in the Cas9 reference sequence or corresponding amino acid positions thereof. In some embodiments, the heterologous polypeptide is inserted between amino acid positions 769-770, 792-793, 793-794, 1016-1017, 1023-1024, 1027-1028, 1030-1031, 1041-1042, 1053-1054, 1055-1056, 1068-1069, 1069-1070, 1248-1249, or 1249-1250 as numbered in the Cas9 reference sequence or corresponding amino acid positions thereof. In some embodiments, the heterologous polypeptide replaces an amino acid residue selected from the group consisting of: 768, 791, 792, 1015, 1016, 1022, 1023, 1026, 1029, 1040, 1052, 1054, 1067, 1068, 1069, 1246, 1247, and 1248 as numbered in the Cas9 reference sequence, or a corresponding amino acid residue in another Cas9 polypeptide. It should be understood that the reference to the Cas9 reference sequence with respect to insertion positions is for illustrative purposes. The insertions as discussed herein are not limited to the Cas9 polypeptide sequence of the Cas9 reference sequence, but include insertion at corresponding locations in variant Cas9 polypeptides, for example a Cas9 nickase (nCas9), nuclease dead Cas9 (dCas9), a Cas9 variant lacking a nuclease domain, a truncated Cas9, or a Cas9 domain lacking partial or complete HNH domain.

[0270] A heterologous polypeptide (e.g., deaminase) can be inserted in the napDNAbp at an amino acid residue selected from the group consisting of: 768, 792, 1022, 1026, 1040, 1068, and 1247 as numbered in the Cas9 reference sequence, or a corresponding amino acid residue in another Cas9 polypeptide. In some embodiments, the heterologous polypeptide is inserted between amino acid positions 768-769, 792-793, 1022-1023, 1026-1027, 1029-1030, 1040-1041, 1068-1069, or 1247-1248 as numbered in the Cas9 reference sequence or corresponding amino acid positions thereof. In some embodiments, the heterologous polypeptide is inserted between amino acid positions 769-770, 793-794, 1023-1024, 1027-1028, 1030-1031, 1041-1042, 1069-1070, or 1248-1249 as numbered in the Cas9 reference sequence or corresponding amino acid positions thereof. In some embodiments, the heterologous polypeptide replaces an amino acid residue selected from the group consisting of: 768, 792, 1022, 1026, 1040, 1068, and 1247 as numbered in the Cas9 reference sequence, or a corresponding amino acid residue in another Cas9 polypeptide.

[0271] A heterologous polypeptide (e.g., deaminase) can be inserted in the napDNAbp at an amino acid residue as described herein, or a corresponding amino acid residue in another Cas9 polypeptide. In an embodiment, a heterologous polypeptide (e.g., deaminase) can be inserted in the napDNAbp at an amino acid residue selected from the group consisting of: 1002, 1003, 1025, 1052-1056, 1242-1247, 1061-1077, 943-947, 686-691, 569-578, 530-539, and 1060-1077 as numbered in the Cas9 reference sequence, or a corresponding amino acid residue in another Cas9 polypeptide. The deaminase (e.g., adenosine deaminase, cytidine deaminase, or adenosine deaminase and cytidine deaminase) can be inserted at the N-terminus or the C-terminus of the residue or replace the residue. In some embodiments, the deaminase (e.g., adenosine deaminase, cytidine deaminase, or adenosine deaminase and cytidine deaminase) is inserted at the C-terminus of the residue.

[0272] In some embodiments, an adenosine deaminase (e.g., TadA) is inserted at an amino acid residue selected from the group consisting of: 1015, 1022, 1029, 1040, 1068, 1247, 1054, 1026, 768, 1067, 1248, 1052, and 1246 as numbered in the Cas9 reference sequence, or a corresponding amino acid residue in another Cas9 polypeptide. In some embodiments, an adenosine deaminase (e.g., TadA) is inserted in place of residues 792-872, 792-906, or 2-791 as numbered in the Cas9 reference sequence, or a corresponding amino acid residue in another Cas9 polypeptide. In some embodiments, the adenosine deaminase is inserted at the N-terminus of an amino acid selected from the group consisting of: 1015, 1022, 1029, 1040, 1068, 1247, 1054, 1026, 768, 1067, 1248, 1052, and 1246 as numbered in the Cas9 reference sequence, or a corresponding amino acid residue in another Cas9 polypeptide. In some embodiments, the adenosine deaminase is inserted at the C-terminus of an amino acid selected from the group consisting of: 1015, 1022, 1029, 1040, 1068, 1247, 1054, 1026, 768, 1067, 1248, 1052, and 1246 as numbered in the Cas9 reference sequence, or a corresponding amino acid residue in another Cas9 polypeptide. In some embodiments, the adenosine deaminase is inserted to replace an amino acid selected from the group consisting of: 1015, 1022, 1029, 1040, 1068, 1247, 1054, 1026, 768, 1067, 1248, 1052, and 1246 as numbered in the Cas9 reference sequence, or a corresponding amino acid residue in another Cas9 polypeptide.

[0273] In some embodiments, a cytidine deaminase (e.g., APOBEC1) is inserted at an amino acid residue selected from the group consisting of: 1016, 1023, 1029, 1040, 1069, and 1247 as numbered in the Cas9 reference sequence, or a corresponding amino acid residue in another Cas9 polypeptide. In some embodiments, the cytidine deaminase is inserted at the N-terminus of an amino acid selected from the group consisting of: 1016, 1023, 1029, 1040, 1069, and 1247 as numbered in the Cas9 reference sequence, or a corresponding amino acid residue in another Cas9 polypeptide. In some embodiments, the cytidine deaminase is inserted at the C-terminus of an amino acid selected from the group consisting of: 1016, 1023, 1029, 1040, 1069, and 1247 as numbered in the Cas9 reference sequence, or a corresponding amino acid residue in another Cas9 polypeptide. In some embodiments, the cytidine deaminase is inserted to replace an amino acid selected from the group consisting of: 1016, 1023, 1029, 1040, 1069, and 1247 as numbered in the Cas9 reference sequence, or a corresponding amino acid residue in another Cas9 polypeptide.

[0274] In some embodiments, the deaminase (e.g., adenosine deaminase, cytidine deaminase, or adenosine deaminase and cytidine deaminase) is inserted at amino acid residue 768 as numbered in the Cas9 reference sequence, or a corresponding amino acid residue in another Cas9 polypeptide. In some embodiments, the deaminase (e.g., adenosine deaminase, cytidine deaminase, or adenosine deaminase and cytidine deaminase) is inserted at the N-terminus of amino acid residue 768 as numbered in the Cas9 reference sequence, or a corresponding amino acid residue in another Cas9 polypeptide. In some embodiments, the deaminase (e.g., adenosine deaminase, cytidine deaminase, or adenosine deaminase and cytidine deaminase) is inserted at the C-terminus of amino acid residue 768 as numbered in the Cas9 reference sequence, or a corresponding amino acid residue in another Cas9 polypeptide. In some embodiments, the deaminase (e.g., adenosine deaminase, cytidine deaminase, or adenosine deaminase and cytidine deaminase) is inserted to replace amino acid residue 768 as numbered in the Cas9 reference sequence, or a corresponding amino acid residue in another Cas9 polypeptide.

[0275] In some embodiments, the deaminase (e.g., adenosine deaminase, cytidine deaminase, or adenosine deaminase and cytidine deaminase) is inserted at amino acid residue 791 or is inserted at amino acid residue 792, as numbered in the Cas9 reference sequence, or a corresponding amino acid residue in another Cas9 polypeptide. In some embodiments, the deaminase (e.g., adenosine deaminase, cytidine deaminase, or adenosine deaminase and cytidine deaminase) is inserted at the N-terminus of amino acid residue 791 or is inserted at the N-terminus of amino acid 792, as numbered in the Cas9 reference sequence, or a corresponding amino acid residue in another Cas9 polypeptide. In some embodiments, the deaminase (e.g., adenosine deaminase, cytidine deaminase, or adenosine deaminase and cytidine deaminase) is inserted at the C-terminus of amino acid 791 or is inserted at the N-terminus of amino acid 792, as numbered in the Cas9 reference sequence, or a corresponding amino acid residue in another Cas9 polypeptide. In some embodiments, the deaminase (e.g., adenosine deaminase, cytidine deaminase, or adenosine deaminase and cytidine deaminase) is inserted to replace amino acid 791, or is inserted to replace amino acid 792, as numbered in the Cas9 reference sequence, or a corresponding amino acid residue in another Cas9 polypeptide.

[0276] In some embodiments, the deaminase (e.g., adenosine deaminase, cytidine deaminase, or adenosine deaminase and cytidine deaminase) is inserted at amino acid residue 1016 as numbered in the Cas9 reference sequence, or a corresponding amino acid residue in another Cas9 polypeptide. In some embodiments, the deaminase (e.g., adenosine deaminase, cytidine deaminase, or adenosine deaminase and cytidine deaminase) is inserted at the N-terminus of amino acid residue 1016 as numbered in the Cas9 reference sequence, or a corresponding amino acid residue in another Cas9 polypeptide. In some embodiments, the deaminase (e.g., adenosine deaminase, cytidine deaminase, or adenosine deaminase and cytidine deaminase) is inserted at the C-terminus of amino acid residue 1016 as numbered in the Cas9 reference sequence, or a corresponding amino acid residue in another Cas9 polypeptide. In some embodiments, the deaminase (e.g., adenosine deaminase, cytidine deaminase, or adenosine deaminase and cytidine deaminase) is inserted to replace amino acid residue 1016 as numbered in the Cas9 reference sequence, or a corresponding amino acid residue in another Cas9 polypeptide.

[0277] In some embodiments, the deaminase (e.g., adenosine deaminase, cytidine deaminase, or adenosine deaminase and cytidine deaminase) is inserted at amino acid residue 1022, or is inserted at amino acid residue 1023, as numbered in the Cas9 reference sequence, or a corresponding amino acid residue in another Cas9 polypeptide. In some embodiments, the deaminase (e.g., adenosine deaminase, cytidine deaminase, or adenosine deaminase and cytidine deaminase) is inserted at the N-terminus of amino acid residue 1022 or is inserted at the N-terminus of amino acid residue 1023, as numbered in the Cas9 reference sequence, or a corresponding amino acid residue in another Cas9 polypeptide. In some embodiments, the deaminase (e.g., adenosine deaminase, cytidine deaminase, or adenosine deaminase and cytidine deaminase) is inserted at the C-terminus of amino acid residue 1022 or is inserted at the C-terminus of amino acid residue 1023, as numbered in the Cas9 reference sequence, or a corresponding amino acid residue in another Cas9 polypeptide. In some embodiments, the deaminase (e.g., adenosine deaminase, cytidine deaminase, or adenosine deaminase and cytidine deaminase) is inserted to replace amino acid residue 1022, or is inserted to replace amino acid residue 1023, as numbered in the Cas9 reference sequence, or a corresponding amino acid residue in another Cas9 polypeptide.

[0278] In some embodiments, the deaminase (e.g., adenosine deaminase, cytidine deaminase, or adenosine deaminase and cytidine deaminase) is inserted at amino acid residue 1026, or is inserted at amino acid residue 1029, as numbered in the Cas9 reference sequence, or a corresponding amino acid residue in another Cas9 polypeptide. In some embodiments, the deaminase (e.g., adenosine deaminase, cytidine deaminase, or adenosine deaminase and cytidine deaminase) is inserted at the N-terminus of amino acid residue 1026 or is inserted at the N-terminus of amino acid residue 1029, as numbered in the Cas9 reference sequence, or a corresponding amino acid residue in another Cas9 polypeptide. In some embodiments, the deaminase (e.g., adenosine deaminase, cytidine deaminase, or adenosine deaminase and cytidine deaminase) is inserted at the C-terminus of amino acid residue 1026 or is inserted at the C-terminus of amino acid residue 1029, as numbered in the Cas9 reference sequence, or a corresponding amino acid residue in another Cas9 polypeptide. In some embodiments, the deaminase (e.g., adenosine deaminase, cytidine deaminase, or adenosine deaminase and cytidine deaminase) is inserted to replace amino acid residue 1026, or is inserted to replace amino acid residue 1029, as numbered in the Cas9 reference sequence, or corresponding amino acid residue in another Cas9 polypeptide.

[0279] In some embodiments, the deaminase (e.g., adenosine deaminase, cytidine deaminase, or adenosine deaminase and cytidine deaminase) is inserted at amino acid residue 1040 as numbered in the Cas9 reference sequence, or a corresponding amino acid residue in another Cas9 polypeptide. In some embodiments, the deaminase (e.g., adenosine deaminase, cytidine deaminase, or adenosine deaminase and cytidine deaminase) is inserted at the N-terminus of amino acid residue 1040 as numbered in the Cas9 reference sequence, or a corresponding amino acid residue in another Cas9 polypeptide. In some embodiments, the deaminase (e.g., adenosine deaminase, cytidine deaminase, or adenosine deaminase and cytidine deaminase) is inserted at the C-terminus of amino acid residue 1040 as numbered in the Cas9 reference sequence, or a corresponding amino acid residue in another Cas9 polypeptide. In some embodiments, the deaminase (e.g., adenosine deaminase, cytidine deaminase, or adenosine deaminase and cytidine deaminase) is inserted to replace amino acid residue 1040 as numbered in the Cas9 reference sequence, or a corresponding amino acid residue in another Cas9 polypeptide.

[0280] In some embodiments, the deaminase (e.g., adenosine deaminase, cytidine deaminase, or adenosine deaminase and cytidine deaminase) is inserted at amino acid residue 1052, or is inserted at amino acid residue 1054, as numbered in the Cas9 reference sequence, or a corresponding amino acid residue in another Cas9 polypeptide. In some embodiments, the deaminase (e.g., adenosine deaminase, cytidine deaminase, or adenosine deaminase and cytidine deaminase) is inserted at the N-terminus of amino acid residue 1052 or is inserted at the N-terminus of amino acid residue 1054, as numbered in the Cas9 reference sequence, or a corresponding amino acid residue in another Cas9 polypeptide. In some embodiments, the deaminase (e.g., adenosine deaminase, cytidine deaminase, or adenosine deaminase and cytidine deaminase) is inserted at the C-terminus of amino acid residue 1052 or is inserted at the C-terminus of amino acid residue 1054, as numbered in the Cas9 reference sequence, or a corresponding amino acid residue in another Cas9 polypeptide. In some embodiments, the deaminase (e.g., adenosine deaminase, cytidine deaminase, or adenosine deaminase and cytidine deaminase) is inserted to replace amino acid residue 1052, or is inserted to replace amino acid residue 1054, as numbered in the Cas9 reference sequence, or a corresponding amino acid residue in another Cas9 polypeptide.

[0281] In some embodiments, the deaminase (e.g., adenosine deaminase, cytidine deaminase, or adenosine deaminase and cytidine deaminase) is inserted at amino acid residue 1067, or is inserted at amino acid residue 1068, or is inserted at amino acid residue 1069, as numbered in the Cas9 reference sequence, or a corresponding amino acid residue in another Cas9 polypeptide. In some embodiments, the deaminase (e.g., adenosine deaminase, cytidine deaminase, or adenosine deaminase and cytidine deaminase) is inserted at the N-terminus of amino acid residue 1067 or is inserted at the N-terminus of amino acid residue 1068 or is inserted at the N-terminus of amino acid residue 1069, as numbered in the Cas9 reference sequence, or a corresponding amino acid residue in another Cas9 polypeptide. In some embodiments, the deaminase (e.g., adenosine deaminase, cytidine deaminase, or adenosine deaminase and cytidine deaminase) is inserted at the C-terminus of amino acid residue 1067 or is inserted at the C-terminus of amino acid residue 1068 or is inserted at the C-terminus of amino acid residue 1069, as numbered in the Cas9 reference sequence, or a corresponding amino acid residue in another Cas9 polypeptide. In some embodiments, the deaminase (e.g., adenosine deaminase, cytidine deaminase, or adenosine deaminase and cytidine deaminase) is inserted to replace amino acid residue 1067, or is inserted to replace amino acid residue 1068, or is inserted to replace amino acid residue 1069, as numbered in the Cas9 reference sequence, or a corresponding amino acid residue in another Cas9 polypeptide.

[0282] In some embodiments, the deaminase (e.g., adenosine deaminase, cytidine deaminase, or adenosine deaminase and cytidine deaminase) is inserted at amino acid residue 1246, or is inserted at amino acid residue 1247, or is inserted at amino acid residue 1248, as numbered in the Cas9 reference sequence, or a corresponding amino acid residue in another Cas9 polypeptide. In some embodiments, the deaminase (e.g., adenosine deaminase, cytidine deaminase, or adenosine deaminase and cytidine deaminase) is inserted at the N-terminus of amino acid residue 1246 or is inserted at the N-terminus of amino acid residue 1247 or is inserted at the N-terminus of amino acid residue 1248, as numbered in the Cas9 reference sequence, or a corresponding amino acid residue in another Cas9 polypeptide. In some embodiments, the deaminase (e.g., adenosine deaminase, cytidine deaminase, or adenosine deaminase and cytidine deaminase) is inserted at the C-terminus of amino acid residue 1246 or is inserted at the C-terminus of amino acid residue 1247 or is inserted at the C-terminus of amino acid residue 1248, as numbered in the Cas9 reference sequence, or a corresponding amino acid residue in another Cas9 polypeptide. In some embodiments, the deaminase (e.g., adenosine deaminase, cytidine deaminase, or adenosine deaminase and cytidine deaminase) is inserted to replace amino acid residue 1246, or is inserted to replace amino acid residue 1247, or is inserted to replace amino acid residue 1248, as numbered in the Cas9 reference sequence, or a corresponding amino acid residue in another Cas9 polypeptide.

[0283] In some embodiments, a heterologous polypeptide (e.g., deaminase) is inserted in a flexible loop of a Cas9 polypeptide. The flexible loop portions can be selected from the group consisting of 530-537, 569-570, 686-691, 943-947, 1002-1025, 1052-1077, 1232-1247, or 1298-1300 as numbered in the Cas9 reference sequence, or a corresponding amino acid residue in another Cas9 polypeptide. The flexible loop portions can be selected from the group consisting of: 1-529, 538-568, 580-685, 692-942, 948-1001, 1026-1051, 1078-1231, or 1248-1297 as numbered in the Cas9 reference sequence, or a corresponding amino acid residue in another Cas9 polypeptide.

[0284] A heterologous polypeptide (e.g., adenine deaminase) can be inserted into a Cas9 polypeptide region corresponding to amino acid residues: 1017-1069, 1242-1247, 1052-1056, 1060-1077, 1002-1003, 943-947, 530-537, 568-579, 686-691, 1242-1247, 1298-1300, 1066-1077, 1052-1056, or 1060-1077 as numbered in the Cas9 reference sequence, or a corresponding amino acid residue in another Cas9 polypeptide.

[0285] A heterologous polypeptide (e.g., adenine deaminase) can be inserted in place of a deleted region of a Cas9 polypeptide. The deleted region can correspond to an N-terminal or C-terminal portion of the Cas9 polypeptide. In some embodiments, the deleted region corresponds to residues 792-872 as numbered in the Cas9 reference sequence, or a corresponding amino acid residue in another Cas9 polypeptide. In some embodiments, the deleted region corresponds to residues 792-906 as numbered in the Cas9 reference sequence, or a corresponding amino acid residue in another Cas9 polypeptide. In some embodiments, the deleted region corresponds to residues 2-791 as numbered in the Cas9 reference sequence, or a corresponding amino acid residue in another Cas9 polypeptide. In some embodiments, the deleted region corresponds to residues 1017-1069 as numbered in the Cas9 reference sequence, or corresponding amino acid residues thereof.

[0286] Exemplary internal fusions base editors are provided in Table 4 below:

TABLE 4
Insertion loci in Cas9 proteins

| BE ID | Modification | Other ID |
|---|---|---|
| IBE001 | Cas9 TadA ins 1015 | ISLAY01 |
| IBE002 | Cas9 TadA ins 1022 | ISLAY02 |
| IBE003 | Cas9 TadA ins 1029 | ISLAY03 |
| IBE004 | Cas9 TadA ins 1040 | ISLAY04 |
| IBE005 | Cas9 TadA ins 1068 | ISLAY05 |
| IBE006 | Cas9 TadA ins 1247 | ISLAY06 |
| IBE007 | Cas9 TadA ins 1054 | ISLAY07 |
| IBE008 | Cas9 TadA ins 1026 | ISLAY08 |
| IBE009 | Cas9 TadA ins 768 | ISLAY09 |
| IBE020 | delta HNH TadA 792 | ISLAY20 |
| IBE021 | N-term fusion single TadA helix | ISLAY21 |
| | truncated 165-end | |
| IBE029 | TadA-Circular Permutant116 ins1067 | ISLAY29 |
| IBE031 | TadA-Circular Permutant 136 ins1248 | ISLAY31 |
| IBE032 | TadA-Circular Permutant 136ins 1052 | ISLAY32 |
| IBE035 | delta 792-872 TadA ins | ISLAY35 |
| IBE036 | delta 792-906 TadA ins | ISLAY36 |
| IBE043 | TadA-Circular Permutant 65 ins1246 | ISLAY43 |
| IBE044 | TadA ins C-term truncate2 791 | ISLAY44 |

[0287] A heterologous polypeptide (e.g., deaminase) can be inserted within a structural or functional domain of a Cas9 polypeptide. A heterologous polypeptide (e.g., deaminase) can be inserted between two structural or functional domains of a Cas9 polypeptide. A heterologous polypeptide (e.g., deaminase) can be inserted in place of a structural or functional domain of a Cas9 polypeptide, for example, after deleting the domain from the Cas9 polypeptide. The structural or functional domains of a Cas9 polypeptide can include, for example, RuvC I, RuvC II, RuvC III, Rec1, Rec2, PI, or HNH.

[0288] In same embodiments, the Cas9 polypeptide lacks one or more domains selected from the group consisting of. RuvC I, RuvC II, RuvC III, Red1, Rec2, PI, or HNH domain. In some embodiments, the Cas9 polypeptide lacks a nuclease domain. In some embodiments, the Cas9 polypeptide lacks an HNH domain. In some embodiments, the Cas9 polypeptide lacks a portion of the HNH domain such that the Cas9 polypeptide has reduced or abolished HNH activity. In some embodiments, the Cas9 polypeptide comprises a deletion of the nuclease domain, and the deaminase is inserted to replace the nuclease domain. In some embodiments, the HNH domain is deleted and the deaminase is inserted in its place. In some embodiments, one or more of the RuvC domains is deleted and the deaminase is inserted in its place.

[0289] A fusion protein comprising a heterologous polypeptide can be flanked by a N-terminal and a C-terminal fragment of a napDNAbp. In some embodiments, the fusion protein comprises a deaminase flanked by a N-terminal fragment and a C-terminal fragment of a Cas9 polypeptide. The N terminal fragment or the C terminal fragment can bind the target polynucleotide sequence. The C-terminus of the N terminal fragment or the N-terminus of the C terminal fragment can comprise a part of a flexible loop of a Cas9 polypeptide. The C-terminus of the N terminal fragment or the N-terminus of the C terminal fragment can comprise a part of an alpha-helix structure of the Cas9 polypeptide. The N-terminal fragment or the C-terminal fragment can comprise a DNA binding domain. The N-terminal fragment or the C-terminal fragment can comprise a RuvC domain. The N-terminal fragment or the C-terminal fragment can comprise an HNH domain. In some embodiments, neither of the N-terminal fragment and the C-terminal fragment comprises an HNH domain.

[0290] In some embodiments, the C-terminus of the N terminal Cas9 fragment comprises an amino acid that is in proximity to a target nucleobase when the fusion protein deaminates the target nucleobase. In some embodiments, the N-terminus of the C terminal Cas9 fragment comprises an amino acid that is in proximity to a target nucleobase when the fusion protein deaminates the target nucleobase. The insertion location of different deaminases can be different in order to have proximity between the target nucleobase and an amino acid in the C-terminus of the N terminal Cas9 fragment or the N-terminus of the C terminal Cas9 fragment. For example, the insertion position of an deaminase can be at an amino acid residue selected from the group consisting of: 1015, 1022, 1029, 1040, 1068, 1247, 1054, 1026, 768, 1067, 1248, 1052, and 1246 as numbered in the Cas9 reference sequence, or a corresponding amino acid residue in another Cas9 polypeptide.

[0291] The N-terminal Cas9 fragment of a fusion protein (i.e. the N-terminal Cas9 fragment flanking the deaminase in a fusion protein) can comprise the N-terminus of a Cas9 polypeptide. The N-terminal Cas9 fragment of a fusion protein can comprise a length of at least about: 100, 200, 300, 400, 500, 600, 700, 800, 900, 1000, 1100, 1200, or 1300 amino acids. The N-terminal Cas9 fragment of a fusion protein can comprise a sequence corresponding to amino acid residues: 1-56, 1-95, 1-200, 1-300, 1-400, 1-500, 1-600, 1-700, 1-718, 1-765, 1-780, 1-906, 1-918, or 1-1100 as numbered in the Cas9 reference sequence, or a corresponding amino acid residue in another Cas9 polypeptide. The N-terminal Cas9 fragment can comprise a sequence comprising at least: 85%, at least 90%, at least 91%, at least 92%, at least 93%, at least 94%, at least 95%, at least 96%, at least 97%, at least 98%, at least 99%, or at least 99.5% sequence identity to amino acid residues: 1-56, 1-95, 1-200, 1-300, 1-400, 1-500, 1-600, 1-700, 1-718, 1-765, 1-780, 1-906, 1-918, or 1-1100 as numbered in the Cas9 reference sequence, or a corresponding amino acid residue in another Cas9 polypeptide.

[0292] The C-terminal Cas9 fragment of a fusion protein (i.e. the C-terminal Cas9 fragment flanking the deaminase in a fusion protein) can comprise the C-terminus of a Cas9 polypeptide. The C-terminal Cas9 fragment of a fusion protein can comprise a length of at least about: 100, 200, 300, 400, 500, 600, 700, 800, 900, 1000, 1100, 1200, or 1300 amino acids. The C-terminal Cas9 fragment of a fusion protein can comprise a sequence corresponding to amino acid residues: 1099-1368, 918-1368, 906-1368, 780-1368, 765-1368, 718-1368, 94-1368, or 56-1368 as numbered in the Cas9 reference sequence, or a corresponding amino acid residue in another Cas9 polypeptide. The N-terminal Cas9 fragment can comprise a sequence comprising at least: 85%, at least 90%, at least 91%, at least 92%, at least 93%, at least 94%, at least 95%, at least 96%, at least 97%, at least 98%, at least 99%, or at least 99.5% sequence identity to amino acid residues: 1099-1368, 918-1368, 906-1368, 780-1368, 765-1368, 718-1368, 94-1368, or 56-1368 as numbered in the Cas9 reference sequence, or a corresponding amino acid residue in another Cas9 polypeptide.

[0293] The N-terminal Cas9 fragment and C-terminal Cas9 fragment of a fusion protein taken together may not correspond to a full-length naturally occurring Cas9 polypeptide sequence, for example, as set forth in the Cas9 reference sequence.

[0294] The fusion protein described herein can effect targeted deamination with reduced deamination at non-target sites (e.g., off-target sites), such as reduced genome wide spurious deamination. The fusion protein described herein can effect targeted deamination with reduced bystander deamination at non-target sites. The undesired deamination or off-target deamination can be reduced by at least 30%, at least 40%, at least 50%, at least 60%, at least 70%, at least 80%, at least 90%, at least 95%, or at least 99% compared with, for example, an end terminus fusion protein comprising the deaminase fused to a N terminus or a C terminus of a Cas9 polypeptide. The undesired deamination or off-target deamination can be reduced by at least one-fold, at least two-fold, at least three-fold, at least four-fold, at least five-fold, at least tenfold, at least fifteen fold, at least twenty fold, at least thirty fold, at least forty fold, at least fifty fold, at least 60 fold, at least 70 fold, at least 80 fold, at least 90 fold, or at least hundred fold, compared with, for example, an end terminus fusion protein comprising the deaminase fused to a N terminus or a C terminus of a Cas9 polypeptide.

[0295] In some embodiments, the deaminase (e.g., adenosine deaminase, cytidine deaminase, or adenosine deaminase and cytidine deaminase) of the fusion protein deaminates no more than two nucleobases within the range of an R-loop. In some embodiments, the deaminase of the fusion protein deaminates no more than three nucleobases within the range of the R-loop. In some embodiments, the deaminase of the fusion protein deaminates no more than 2, 3, 4, 5, 6, 7, 8, 9, or 10 nucleobases within the range of the R-loop. An R-loop is a three-stranded nucleic acid structure including a DNA:RNA hybrid, a DNA:DNA or an RNA: RNA complementary structure and the associated with single-stranded DNA. As used herein, an R-loop may be formed when a target polynucleotide is contacted with a CRISPR complex or a base editing complex, wherein a portion of a guide polynucleotide, e.g. a guide RNA, hybridizes with and displaces with a portion of a target polynucleotide, e.g. a target DNA. In some embodiments, an R-loop comprises a hybridized region of a spacer sequence and a target DNA complementary sequence. An R-loop region may be of about 5, 6, 7, 8, 9, 10, 11, 12, 13, 14, 15, 16, 17, 18, 19, 20, 21, 22, 23, 24, 25, 26, 27, 28, 29, 30, 31, 32, 33, 34, 35, 36, 37, 38, 39, 40, 41, 42, 43, 44, 45, 46, 47, 48, 49, or 50 nucleobase pairs in length. In some embodiments, the R-loop region is about 20 nucleobase pairs in length. It should be understood that, as used herein, an R-loop region is not limited to the target DNA strand that hybridizes with the guide polynucleotide. For example, editing of a target nucleobase within an R-loop region may be to a DNA strand that comprises the complementary strand to a guide RNA, or may be to a DNA strand that is the opposing strand of the strand complementary to the guide RNA. In some embodiments, editing in the region of the R-loop comprises editing a nucleobase on non-complementary strand (protospacer strand) to a guide RNA in a target DNA sequence.

[0296] The fusion protein described herein can effect target deamination in an editing window different from canonical base editing. In some embodiments, a target nucleobase is from about 1 to about 20 bases upstream of a PAM sequence in the target polynucleotide sequence. In some embodiments, a target nucleobase is from about 2 to about 12 bases upstream of a PAM sequence in the target polynucleotide sequence. In some embodiments, a target nucleobase is from about 1 to 9 base pairs, about 2 to 10 base pairs, about 3 to 11 base pairs, about 4 to 12 base pairs, about 5 to 13 base pairs, about 6 to 14 base pairs, about 7 to 15 base pairs, about 8 to 16 base pairs, about 9 to 17 base pairs, about 10 to 18 base pairs, about 11 to 19 base pairs, about 12 to 20 base pairs, about 1 to 7 base pairs, about 2 to 8 base pairs, about 3 to 9 base pairs, about 4 to 10 base pairs, about 5 to 11 base pairs, about 6 to 12 base pairs, about 7 to 13 base pairs, about 8 to 14 base pairs, about 9 to 15 base pairs, about 10 to 16 base pairs, about 11 to 17 base pairs, about 12 to 18 base pairs, about 13 to 19 base pairs, about 14 to 20 base pairs, about 1 to 5 base pairs, about 2 to 6 base pairs, about 3 to 7 base pairs, about 4 to 8 base pairs, about 5 to 9 base pairs, about 6 to 10 base pairs, about 7 to 11 base pairs, about 8 to 12 base pairs, about 9 to 13 base pairs, about 10 to 14 base pairs, about 11 to 15 base pairs, about 12 to 16 base pairs, about 13 to 17 base pairs, about 14 to 18 base pairs, about 15 to 19 base pairs, about 16 to 20 base pairs, about 1 to 3 base pairs, about 2 to 4 base pairs, about 3 to 5 base pairs, about 4 to 6 base pairs, about 5 to 7 base pairs, about 6 to 8 base pairs, about 7 to 9 base pairs, about 8 to 10 base pairs, about 9 to 11 base pairs, about 10 to 12 base pairs, about 11 to 13 base pairs, about 12 to 14 base pairs, about 13 to 15 base pairs, about 14 to 16 base pairs, about 15 to 17 base pairs, about 16 to 18 base pairs, about 17 to 19 base pairs, about 18 to 20 base pairs away or upstream of the PAM sequence. In some embodiments, a target nucleobase is about 1, 2, 3, 4, 5, 6, 7, 8, 9, 10, 11, 12, 13, 14, 15, 16, 17, 18, 19, 20, or more base pairs away from or upstream of the PAM sequence. In some embodiments, a target nucleobase is about 1, 2, 3, 4, 5, 6, 7, 8, or 9 base pairs upstream of the PAM sequence. In some embodiments, a target nucleobase is about 2, 3, 4, or 6 base pairs upstream of the PAM sequence.

[0297] The fusion protein can comprise more than one heterologous polypeptide. For example, the fusion protein can additionally comprise one or more UGI domains and/or one or more nuclear localization signals. The two or more heterologous domains can be inserted in tandem. The two or more heterologous domains can be inserted at locations such that they are not in tandem in the NapDNAbp.

[0298] A fusion protein can comprise a linker between the deaminase and the napDNAbp polypeptide. The linker can be a peptide or a non-peptide linker. For example, the linker can be an XTEN, (GGGS)n (SEQ ID NO: 171), (GGGGS)n (SEQ ID NO: 172), (G)n, (EAAAK)n (SEQ ID NO: 173), (GGS)n, SGSETPGTSESATPES (SEQ ID NO: 174). In some embodiments, the fusion protein comprises a linker between the N-terminal Cas9 fragment and the deaminase. In some embodiments, the fusion protein comprises a linker between the C-terminal Cas9 fragment and the deaminase. In some embodiments, the N-terminal and C-terminal fragments of napDNAbp are connected to the deaminase with a linker. In some embodiments, the N-terminal and C-terminal fragments are joined to the deaminase domain without a linker. In some embodiments, the fusion protein comprises a linker between the N-terminal Cas9 fragment and the deaminase, but does not comprise a linker between the C-terminal Cas9 fragment and the deaminase. In some embodiments, the fusion protein comprises a linker between the C-terminal Cas9 fragment and the deaminase, but does not comprise a linker between the N-terminal Cas9 fragment and the deaminase.

[0299] In some embodiments, the napDNAbp in the fusion protein is a Cas12 polypeptide, e.g., Cas12b/C2c1, or a fragment thereof. The Cas12 polypeptide can be a variant Cas12 polypeptide. In other embodiments, the N- or C-terminal fragments of the Cas12 polypeptide comprise a nucleic acid programmable DNA binding domain or a RuvC domain. In other embodiments, the fusion protein contains a linker between the Cas12 polypeptide and the catalytic domain. In other embodiments, the amino acid sequence of the linker is GGSGGS (SEQ ID NO: 175) or GSSGSETPGTSESATPESSG (SEQ ID NO: 176). In other embodiments, the linker is a rigid linker. In other embodiments of the above aspects, the linker is encoded by

(SEQ ID NO: 177)
GGAGGCTCTGGAGGAAGC
or
(SEQ ID NO: 178)
GGCTCTTCTGGATCTGAAACACCTGGCACAAGCGAGAGCGCCACCCCTG
AGAGCTCTGGC.

[0300] Fusion proteins comprising a heterologous catalytic domain flanked by N- and C-terminal fragments of a Cas12 polypeptide are also useful for base editing in the methods as described herein. Fusion proteins comprising Cas12 and one or more deaminase domains, e.g., adenosine deaminase, or comprising an adenosine deaminase domain flanked by Cas12 sequences are also useful for highly specific and efficient base editing of target sequences. In an embodiment, a chimeric Cas12 fusion protein contains a heterologous catalytic domain (e.g., adenosine deaminase, cytidine deaminase, or adenosine deaminase and cytidine deaminase) inserted within a Cas12 polypeptide. In some embodiments, the fusion protein comprises an adenosine deaminase domain and a cytidine deaminase domain inserted within a Cas12. In some embodiments, an adenosine deaminase is fused within Cas12 and a cytidine deaminase is fused to the C-terminus. In some embodiments, an adenosine deaminase is fused within Cas12 and a cytidine deaminase fused to the N-terminus. In some embodiments, a cytidine deaminase is fused within Cas12 and an adenosine deaminase is fused to the C-terminus. In some embodiments, a cytidine deaminase is fused within Cas12 and an adenosine deaminase fused to the N-terminus. Exemplary structures of a fusion protein with an adenosine deaminase and a cytidine deaminase and a Cas12 are provided as follows:

[0301] NH₂-[Cas12(adenosine deaminase)]-[cytidine deaminase]-COOH;

[0302] NH₂-[cytidine deaminase]-[Cas12(adenosine deaminase)]-COOH;

[0303] NH₂-[Cas12(cytidine deaminase)]-[adenosine deaminase]-COOH; or

[0304] NH₂-[adenosine deaminase]-[Cas12(cytidine deaminase)]-COOH;

[0305] In some embodiments, the “-” used in the general architecture above indicates the presence of an optional linker.

[0306] In various embodiments, the catalytic domain has DNA modifying activity (e.g., deaminase activity), such as adenosine deaminase activity. In some embodiments, the adenosine deaminase is a TadA (e.g., TadA*7.10). In some embodiments, the TadA is a TadA*8. In some embodiments, a TadA*8 is fused within Cas12 and a cytidine deaminase is fused to the C-terminus. In some embodiments, a TadA*8 is fused within Cas12 and a cytidine deaminase fused to the N-terminus. In some embodiments, a cytidine deaminase is fused within Cas12 and a TadA*8 is fused to the C-terminus. In some embodiments, a cytidine deaminase is fused within Cas12 and a TadA*8 fused to the N-terminus. Exemplary structures of a fusion protein with a TadA*8 and a cytidine deaminase and a Cas12 are provided as follows:

[0307] N-[Cas12(TadA*8)]-[cytidine deaminase]-C;

[0308] N-[cytidine deaminase]-[Cas12(TadA*8)]-C;

[0309] N-[Cas12(cytidine deaminase)]-[TadA*8]-C; or

[0310] N-[TadA*8]-[Cas12(cytidine deaminase)]-C.

[0311] In some embodiments, the “-” used in the general architecture above indicates the presence of an optional linker.

[0312] In other embodiments, the fusion protein contains one or more catalytic domains.

[0313] In other embodiments, at least one of the one or more catalytic domains is inserted within the Cas12 polypeptide or is fused at the Cas12 N-terminus or C-terminus. In other embodiments, at least one of the one or more catalytic domains is inserted within a loop, an alpha helix region, an unstructured portion, or a solvent accessible portion of the Cas12 polypeptide. In other embodiments, the Cas12 polypeptide is Cas12a, Cas12b, Cas12c, Cas12d, Cas12e, Cas12g, Cas12h, Cas12i, or Cas12j/CasΦ. In other embodiments, the Cas12 polypeptide has at least about 85% amino acid sequence identity to Bacillus hisashii Cas12b, Bacillus thermoamylovorans Cas12b, Bacillus sp. V3-13 Cas12b, or Alicyclobacillus acidiphilus Cas12b (SEQ ID NO: 179). In other embodiments, the Cas12 polypeptide has at least about 90% amino acid sequence identity to Bacillus hisashii Cas12b (SEQ ID NO: 180), Bacillus thermoamylovorans Cas12b, Bacillus sp. V3-13 Cas12b, or Alicyclobacillus acidiphilus Cas12b. In other embodiments, the Cas12 polypeptide has at least about 95% amino acid sequence identity to Bacillus hisashii Cas12b, Bacillus thermoamylovorans Cas12b (SEQ ID NO: 181), Bacillus sp. V3-13 Cas12b (SEQ ID NO: 182), or Alicyclobacillus acidiphilus Cas12b. In other embodiments, the Cas12 polypeptide contains or consists essentially of a fragment of Bacillus hisashii Cas12b, Bacillus thermoamylovorans Cas12b, Bacillus sp. V3-13 Cas12b, or Alicyclobacillus acidiphilus Cas12b. In embodiments, the Cas12 polypeptide contains BvCas12b (V4), which in some embodiments is expressed as 5′ mRNA Cap---5′ UTR---bhCas12b---STOP sequence---3′ UTR---120polyA tail (SEQ ID NOs: 183-185).

[0314] In other embodiments, the catalytic domain is inserted between amino acid positions 153-154, 255-256, 306-307, 980-981, 1019-1020, 534-535, 604-605, or 344-345 of BhCas12b or a corresponding amino acid residue of Cas12a, Cas12c, Cas12d, Cas12e, Cas12g, Cas12h, Cas12i, or Cas12j/CasΦ. In other embodiments, the catalytic domain is inserted between amino acids P153 and S154 of BhCas12b. In other embodiments, the catalytic domain is inserted between amino acids K255 and E256 of BhCas12b. In other embodiments, the catalytic domain is inserted between amino acids D980 and G981 of BhCas12b. In other embodiments, the catalytic domain is inserted between amino acids K1019 and L1020 of BhCas12b. In other embodiments, the catalytic domain is inserted between amino acids F534 and P535 of BhCas12b. In other embodiments, the catalytic domain is inserted between amino acids K604 and G605 of BhCas12b. In other embodiments, the catalytic domain is inserted between amino acids H344 and F345 of BhCas12b. In other embodiments, catalytic domain is inserted between amino acid positions 147 and 148, 248 and 249, 299 and 300, 991 and 992, or 1031 and 1032 of BvCas12b or a corresponding amino acid residue of Cas12a, Cas12c, Cas12d, Cas12e, Cas12g, Cas12h, Cas12i, or Cas12j/CasΦ. In other embodiments, the catalytic domain is inserted between amino acids P147 and D148 of BvCas12b. In other embodiments, the catalytic domain is inserted between amino acids G248 and G249 of BvCas12b. In other embodiments, the catalytic domain is inserted between amino acids P299 and E300 of BvCas12b. In other embodiments, the catalytic domain is inserted between amino acids G991 and E992 of BvCas12b. In other embodiments, the catalytic domain is inserted between amino acids K1031 and M1032 of BvCas12b. In other embodiments, the catalytic domain is inserted between amino acid positions 157 and 158, 258 and 259, 310 and 311, 1008 and 1009, or 1044 and 1045 of AaCas12b or a corresponding amino acid residue of Cas12a, Cas12c, Cas12d, Cas12e, Cas12g, Cas12h, Cas12i, or Cas12j/CasΦ. In other embodiments, the catalytic domain is inserted between amino acids P157 and G158 of AaCas12b. In other embodiments, the catalytic domain is inserted between amino acids V258 and G259 of AaCas12b. In other embodiments, the catalytic domain is inserted between amino acids D310 and P311 of AaCas12b. In other embodiments, the catalytic domain is inserted between amino acids G1008 and E1009 of AaCas12b. In other embodiments, the catalytic domain is inserted between amino acids G1044 and K1045 at of AaCas12b.

[0315] In other embodiments, the fusion protein contains a nuclear localization signal (e.g., a bipartite nuclear localization signal). In other embodiments, the amino acid sequence of the nuclear localization signal is MAPKKKRKVGIHGVPAA (SEQ ID NO: 186). In other embodiments of the above aspects, the nuclear localization signal is encoded by the following sequence: ATGGCCCCAAAGAAGAAGCGGAAGGTCGGTATCCACGGAGTCCCAGCAGCC (SEQ ID NO: 187). In other embodiments, the Cas12b polypeptide contains a mutation that silences the catalytic activity of a RuvC domain. In other embodiments, the Cas12b polypeptide contains D574A, D829A and/or D952A mutations. In other embodiments, the fusion protein further contains a tag (e.g., an influenza hemagglutinin tag).

[0316] In some embodiments, the fusion protein comprises a napDNAbp domain (e.g., Cas12-derived domain) with an internally fused nucleobase editing domain (e.g., all or a portion of a deaminase domain, e.g., an adenosine deaminase domain). In some embodiments, the napDNAbp is a Cas12b. In some embodiments, the base editor comprises a BhCas12b domain with an internally fused TadA*8 domain inserted at the loci provided in Table 5 below.

TABLE 5
Insertion loci in Cas12b proteins

| | Insertion | Inserted |
|---|---|---|
| | site | between aa |
| BhCas12b | | |
| position 1 | 153 | PS |
| position 2 | 255 | KE |
| position 3 | 306 | DE |
| position 4 | 980 | DG |
| position 5 | 1019 | KL |
| position 6 | 534 | FP |
| position 7 | 604 | KG |
| position 8 | 344 | HF |
| BvCas12b | | |
| position 1 | 147 | PD |
| position 2 | 248 | GG |
| position 3 | 299 | PE |
| position 4 | 991 | GE |
| position 5 | 1031 | KM |
| AaCas12b | | |
| position 1 | 157 | PG |
| position 2 | 258 | VG |
| position 3 | 310 | DP |
| position 4 | 1008 | GE |
| position 5 | 1044 | GK |

[0317] By way of nonlimiting example, an adenosine deaminase (e.g., TadA*8.13) may be inserted into a BhCas12b to produce a fusion protein (e.g., TadA*8.13-BhCas12b) that effectively edits a nucleic acid sequence.

[0318] In some embodiments, the base editing system described herein is an ABE with TadA inserted into a Cas9. Polypeptide sequences of relevant ABEs with TadA inserted into a Cas9 are provided in the attached Sequence Listing as SEQ ID NOs: 188-233.

[0319] In some embodiments, adenosine deaminase base editors were generated to insert TadA or variants thereof into the Cas9 polypeptide at the identified positions.

[0320] Exemplary, yet nonlimiting, fusion proteins are described in International PCT Application Nos. PCT/US2020/016285 and U.S. Provisional Application Nos. 62/852,228 and 62/852,224, the contents of which are incorporated by reference herein in their entireties.

### A to G Editing

[0321] In some embodiments, a base editor described herein comprises an adenosine deaminase domain. Such an adenosine deaminase domain of a base editor can facilitate the editing of an adenine (A) nucleobase to a guanine (G) nucleobase by deaminating the A to form inosine (I), which exhibits base pairing properties of G. Adenosine deaminase is capable of deaminating (i.e., removing an amine group) adenine of a deoxyadenosine residue in deoxyribonucleic acid (DNA). In some embodiments, an A-to-G base editor further comprises an inhibitor of inosine base excision repair, for example, a uracil glycosylase inhibitor (UGI) domain or a catalytically inactive inosine specific nuclease. Without wishing to be bound by any particular theory, the UGI domain or catalytically inactive inosine specific nuclease can inhibit or prevent base excision repair of a deaminated adenosine residue (e.g., inosine), which can improve the activity or efficiency of the base editor.

[0322] A base editor comprising an adenosine deaminase can act on any polynucleotide, including DNA, RNA and DNA-RNA hybrids. In certain embodiments, a base editor comprising an adenosine deaminase can deaminate a target A of a polynucleotide comprising RNA. For example, the base editor can comprise an adenosine deaminase domain capable of deaminating a target A of an RNA polynucleotide and/or a DNA-RNA hybrid polynucleotide. In an embodiment, an adenosine deaminase incorporated into a base editor comprises all or a portion of adenosine deaminase acting on RNA (ADAR, e.g., ADAR1 or ADAR2) or tRNA (ADAT). A base editor comprising an adenosine deaminase domain can also be capable of deaminating an A nucleobase of a DNA polynucleotide. In an embodiment an adenosine deaminase domain of a base editor comprises all or a portion of an ADAT comprising one or more mutations which permit the ADAT to deaminate a target A in DNA. For example, the base editor can comprise all or a portion of an ADAT from Escherichia coli (EcTadA) comprising one or more of the following mutations: D108N, A106V, D147Y, E155V, L84F, H123Y, I156F, or a corresponding mutation in another adenosine deaminase. Exemplary ADAT homolog polypeptide sequences are provided in the Sequence Listing as SEQ ID NOs: 234-241.

[0323] The adenosine deaminase can be derived from any suitable organism (e.g., E. coli). In some embodiments, the adenosine deaminase is from a prokaryote. In some embodiments, the adenosine deaminase is from a bacterium. In some embodiments, the adenosine deaminase is from Escherichia coli, Staphylococcus aureus, Salmonella typhi, Shewanella putrefaciens, Haemophilus influenzae, Caulobacter crescentus, or Bacillus subtilis. In some embodiments, the adenosine deaminase is from E. coli. In some embodiments, the adenine deaminase is a naturally-occurring adenosine deaminase that includes one or more mutations corresponding to any of the mutations provided herein (e.g., mutations in ecTadA). The corresponding residue in any homologous protein can be identified by e.g., sequence alignment and determination of homologous residues. The mutations in any naturally-occurring adenosine deaminase (e.g., having homology to ecTadA) that correspond to any of the mutations described herein (e.g., any of the mutations identified in ecTadA) can be generated accordingly.

[0324] In some embodiments, the adenosine deaminase comprises an amino acid sequence that is at least 60%, at least 65%, at least 70%, at least 75%, at least 80%, at least 85%, at least 90%, at least 95%, at least 96%, at least 97%, at least 98%, at least 99%, or at least 99.5% identical to any one of the amino acid sequences set forth in any of the adenosine deaminases provided herein. It should be appreciated that adenosine deaminases provided herein may include one or more mutations (e.g., any of the mutations provided herein). The disclosure provides any deaminase domains with a certain percent identify plus any of the mutations or combinations thereof described herein. In some embodiments, the adenosine deaminase comprises an amino acid sequence that has 1, 2, 3, 4, 5, 6, 7, 8, 9, 10, 11, 12, 13, 14, 15, 16, 17, 18, 19, 20, 21, 22, 21, 24, 25, 26, 27, 28, 29, 30, 31, 32, 33, 34, 35, 36, 37, 38, 39, 40, 41, 42, 43, 44, 45, 46, 47, 48, 49, 50, or more mutations compared to a reference sequence, or any of the adenosine deaminases provided herein. In some embodiments, the adenosine deaminase comprises an amino acid sequence that has at least 5, at least 10, at least 15, at least 20, at least 25, at least 30, at least 35, at least 40, at least 45, at least 50, at least 60, at least 70, at least 80, at least 90, at least 100, at least 110, at least 120, at least 130, at least 140, at least 150, at least 160, or at least 170 identical contiguous amino acid residues as compared to any one of the amino acid sequences known in the art or described herein.

[0325] It should be appreciated that any of the mutations provided herein (e.g., based on the TadA reference sequence) can be introduced into other adenosine deaminases, such as E. coli TadA (ecTadA), S. aureus TadA (saTadA), or other adenosine deaminases (e.g., bacterial adenosine deaminases). It would be apparent to the skilled artisan that additional deaminases may similarly be aligned to identify homologous amino acid residues that can be mutated as provided herein. Thus, any of the mutations identified in the TadA reference sequence can be made in other adenosine deaminases (e.g., ecTada) that have homologous amino acid residues. It should also be appreciated that any of the mutations provided herein can be made individually or in any combination in the TadA reference sequence or another adenosine deaminase.

[0326] In some embodiments, the adenosine deaminase comprises a D108X mutation in the TadA reference sequence, or a corresponding mutation in another adenosine deaminase, where X indicates any amino acid other than the corresponding amino acid in the wild-type adenosine deaminase. In some embodiments, the adenosine deaminase comprises a D18G, D108N, D108V, D108A, or D108Y mutation in TadA reference sequence, or a corresponding mutation in another adenosine deaminase. It should be appreciated, however, that additional deaminases may similarly be aligned to identify homologous amino acid residues that can be mutated as provided herein.

[0327] In some embodiments, the adenosine deaminase comprises an A106X mutation in TadA reference sequence, or a corresponding mutation in another adenosine deaminase, where X indicates any amino acid other than the corresponding amino acid in the wild-type adenosine deaminase. In some embodiments, the adenosine deaminase comprises an A106V mutation in TadA reference sequence, or a corresponding mutation in another adenosine deaminase (e.g., ecTadA).

[0328] In some embodiments, the adenosine deaminase comprises a E155X mutation in TadA reference sequence, or a corresponding mutation in another adenosine deaminase, where the presence of X indicates any amino acid other than the corresponding amino acid in the wild-type adenosine deaminase. In some embodiments, the adenosine deaminase comprises a E155D, E155G, or E155V mutation in TadA reference sequence, or a corresponding mutation in another adenosine deaminase (e.g., ecTadA).

[0329] In some embodiments, the adenosine deaminase comprises a D147X mutation in TadA reference sequence, or a corresponding mutation in another adenosine deaminase, where the presence of X indicates any amino acid other than the corresponding amino acid in the wild-type adenosine deaminase. In some embodiments, the adenosine deaminase comprises a D147Y, mutation in TadA reference sequence, or a corresponding mutation in another adenosine deaminase (e.g., ecTadA).

[0330] In some embodiments, the adenosine deaminase comprises an A106X, E155X, or D147X, mutation in the TadA reference sequence, or a corresponding mutation in another adenosine deaminase (e.g., ecTadA), where X indicates any amino acid other than the corresponding amino acid in the wild-type adenosine deaminase. In some embodiments, the adenosine deaminase comprises an E155D, E155G, or E155V mutation. In some embodiments, the adenosine deaminase comprises a D147Y.

[0331] It should also be appreciated that any of the mutations provided herein may be made individually or in any combination in ecTadA or another adenosine deaminase. For example, an adenosine deaminase may contain a D108N, a A106V, a E155V, and/or a D147Y mutation in TadA reference sequence, or a corresponding mutation in another adenosine deaminase (e.g., ecTadA). In some embodiments, an adenosine deaminase comprises the following group of mutations (groups of mutations are separated by a “;”) in TadA reference sequence, or corresponding mutations in another adenosine deaminase: D108N and A106V; D108N and E155V; D108N and D147Y; A106V and E155V; A106V and D147Y; E155V and D147Y; D108N, A106V, and E155V; D108N, A106V, and D147Y; D108N, E155V, and D147Y; A106V, E155V, and D147Y; and D108N, A106V, E155V, and D147Y. It should be appreciated, however, that any combination of corresponding mutations provided herein may be made in an adenosine deaminase (e.g., ecTadA).

[0332] In some embodiments, the adenosine deaminase comprises one or more of a H8X, T17X, L18X, W23X, L34X, W45X, R51X, A56X, E59X, E85X, M94X, I95X, V102X, F104X, A106X, R107X, D108X, K110X, M118X, N127X, A138X, F149X, M151X, R153X, Q154X, I156X, and/or K157X mutation in TadA reference sequence, or one or more corresponding mutations in another adenosine deaminase, where the presence of X indicates any amino acid other than the corresponding amino acid in the wild-type adenosine deaminase. In some embodiments, the adenosine deaminase comprises one or more of H8Y, T17S, L18E, W23L, L34S, W45L, R51H, A56E, or A56S, E59G, E85K, or E85G, M94L, I95L, V102A, F104L, A106V, R107C, or R107H, or R107P, D108G, or D108N, or D108V, or D108A, or D108Y, K110I, M118K, N127S, A138V, F149Y, M151V, R153C, Q154L, 1156D, and/or K157R mutation in TadA reference sequence, or one or more corresponding mutations in another adenosine deaminase.

[0333] In some embodiments, the adenosine deaminase comprises one or more of a H8X, D108X, and/or N127X mutation in TadA reference sequence, or one or more corresponding mutations in another adenosine deaminase, where X indicates the presence of any amino acid. In some embodiments, the adenosine deaminase comprises one or more of a H8Y, D108N, and/or N127S mutation in TadA reference sequence, or one or more corresponding mutations in another adenosine deaminase.

[0334] In some embodiments, the adenosine deaminase comprises one or more of H8X, R26X, M61X, L68X, M70X, A106X, D108X, A109X, N127X, D147X, R152X, Q154X, E155X, K161X, Q163X, and/or T166X mutation in TadA reference sequence, or one or more corresponding mutations in another adenosine deaminase, where X indicates the presence of any amino acid other than the corresponding amino acid in the wild-type adenosine deaminase. In some embodiments, the adenosine deaminase comprises one or more of H8Y, R26W, M61I, L68Q, M70V, A106T, D108N, A109T, N127S, D147Y, R152C, Q154H or Q154R, E155G or E155V or E155D, K161Q, Q163H, and/or T166P mutation in TadA reference sequence, or one or more corresponding mutations in another adenosine deaminase.

[0335] In some embodiments, the adenosine deaminase comprises one, two, three, four, five, or six mutations selected from the group consisting of H8X, D108X, N127X, D147X, R152X, and Q154X in TadA reference sequence, or a corresponding mutation or mutations in another adenosine deaminase (e.g., ecTadA), where X indicates the presence of any amino acid other than the corresponding amino acid in the wild-type adenosine deaminase. In some embodiments, the adenosine deaminase comprises one, two, three, four, five, six, seven, or eight mutations selected from the group consisting of H8X, M61X, M70X, D108X, N127X, Q154X, E155X, and Q163X in TadA reference sequence, or a corresponding mutation or mutations in another adenosine deaminase (e.g., ecTadA), where X indicates the presence of any amino acid other than the corresponding amino acid in the wild-type adenosine deaminase. In some embodiments, the adenosine deaminase comprises one, two, three, four, or five, mutations selected from the group consisting of H8X, D108X, N127X, E155X, and T166X in TadA reference sequence, or a corresponding mutation or mutations in another adenosine deaminase (e.g., ecTadA), where X indicates the presence of any amino acid other than the corresponding amino acid in the wild-type adenosine deaminase.

[0336] In some embodiments, the adenosine deaminase comprises one, two, three, four, five, or six mutations selected from the group consisting of H8X, A106X, and D108X, or a corresponding mutation or mutations in another adenosine deaminase, where X indicates the presence of any amino acid other than the corresponding amino acid in the wild-type adenosine deaminase. In some embodiments, the adenosine deaminase comprises one, two, three, four, five, six, seven, or eight mutations selected from the group consisting of H8X, R26X, L68X, D108X, N127X, D147X, and E155X, or a corresponding mutation or mutations in another adenosine deaminase, where X indicates the presence of any amino acid other than the corresponding amino acid in the wild-type adenosine deaminase.

[0337] In some embodiments, the adenosine deaminase comprises one, two, three, four, five, six, or seven mutations selected from the group consisting of H8X, R126X, L68X, D108X, N127X, D147X, and E155X in TadA reference sequence, or a corresponding mutation or mutations in another adenosine deaminase, where X indicates the presence of any amino acid other than the corresponding amino acid in the wild-type adenosine deaminase. In some embodiments, the adenosine deaminase comprises one, two, three, four, or five mutations selected from the group consisting of H8X, D108X, A109X, N127X, and E155X in TadA reference sequence, or a corresponding mutation or mutations in another adenosine deaminase, where X indicates the presence of any amino acid other than the corresponding amino acid in the wild-type adenosine deaminase.

[0338] In some embodiments, the adenosine deaminase comprises one, two, three, four, five, or six mutations selected from the group consisting of H8Y, D108N, N127S, D147Y, R152C, and Q154H in TadA reference sequence, or a corresponding mutation or mutations in another adenosine deaminase (e.g., ecTadA). In some embodiments, the adenosine deaminase comprises one, two, three, four, five, six, seven, or eight mutations selected from the group consisting of H8Y, M61I, M70V, D108N, N127S, Q154R, E155G and Q163H in TadA reference sequence, or a corresponding mutation or mutations in another adenosine deaminase (e.g., ecTadA). In some embodiments, the adenosine deaminase comprises one, two, three, four, or five, mutations selected from the group consisting of H8Y, D108N, N127S, E155V, and T166P in TadA reference sequence, or a corresponding mutation or mutations in another adenosine deaminase (e.g., ecTadA). In some embodiments, the adenosine deaminase comprises one, two, three, four, five, or six mutations selected from the group consisting of H8Y, A106T, D108N, N127S, E155D, and K161Q in TadA reference sequence, or a corresponding mutation or mutations in another adenosine deaminase (e.g., ecTadA). In some embodiments, the adenosine deaminase comprises one, two, three, four, five, six, seven, or eight mutations selected from the group consisting of H8Y, R26W, L68Q, D108N, N127S, D147Y, and E155V in TadA reference sequence, or a corresponding mutation or mutations in another adenosine deaminase (e.g., ecTadA). In some embodiments, the adenosine deaminase comprises one, two, three, four, or five, mutations selected from the group consisting of H8Y, D108N, A109T, N127S, and E155G in TadA reference sequence, or a corresponding mutation or mutations in another adenosine deaminase (e.g., ecTadA).

[0339] In some embodiments, the adenosine deaminase comprises one or more of the or one or more corresponding mutations in another adenosine deaminase. In some embodiments, the adenosine deaminase comprises a D108N, D108G, or D108V mutation in TadA reference sequence, or corresponding mutations in another adenosine deaminase. In some embodiments, the adenosine deaminase comprises a A106V and D108N mutation in TadA reference sequence, or corresponding mutations in another adenosine deaminase. In some embodiments, the adenosine deaminase comprises R107C and D108N mutations in TadA reference sequence, or corresponding mutations in another adenosine deaminase. In some embodiments, the adenosine deaminase comprises a H8Y, D108N, N127S, D147Y, and Q154H mutation in TadA reference sequence, or corresponding mutations in another adenosine deaminase. In some embodiments, the adenosine deaminase comprises a H8Y, D108N, N127S, D147Y, and E155V mutation in TadA reference sequence, or corresponding mutations in another adenosine deaminase. In some embodiments, the adenosine deaminase comprises a D108N, D147Y, and E155V mutation in TadA reference sequence, or corresponding mutations in another adenosine deaminase. In some embodiments, the adenosine deaminase comprises a H8Y, D108N, and N127S mutation in TadA reference sequence, or corresponding mutations in another adenosine deaminase. In some embodiments, the adenosine deaminase comprises a A106V, D108N, D147Y, and E155V mutation in TadA reference sequence, or corresponding mutations in another adenosine deaminase (e.g., ecTadA).

[0340] In some embodiments, the adenosine deaminase comprises one or more of S2X, H8X, 149X, L84X, H123X, N127X, I156X, and/or K160X mutation in TadA reference sequence, or one or more corresponding mutations in another adenosine deaminase, where the presence of X indicates any amino acid other than the corresponding amino acid in the wild-type adenosine deaminase. In some embodiments, the adenosine deaminase comprises one or more of S2A, H8Y, I49F, L84F, H123Y, N127S, 1156F, and/or K160S mutation in TadA reference sequence, or one or more corresponding mutations in another adenosine deaminase (e.g., ecTadA).

[0341] In some embodiments, the adenosine deaminase comprises an L84X mutation adenosine deaminase, where X indicates any amino acid other than the corresponding amino acid in the wild-type adenosine deaminase. In some embodiments, the adenosine deaminase comprises an L84F mutation in TadA reference sequence, or a corresponding mutation in another adenosine deaminase (e.g., ecTadA).

[0342] In some embodiments, the adenosine deaminase comprises an H123X mutation in TadA reference sequence, or a corresponding mutation in another adenosine deaminase, where X indicates any amino acid other than the corresponding amino acid in the wild-type adenosine deaminase. In some embodiments, the adenosine deaminase comprises an H123Y mutation in TadA reference sequence, or a corresponding mutation in another adenosine deaminase.

[0343] In some embodiments, the adenosine deaminase comprises an I156X mutation in TadA reference sequence, or a corresponding mutation in another adenosine deaminase, where X indicates any amino acid other than the corresponding amino acid in the wild-type adenosine deaminase. In some embodiments, the adenosine deaminase comprises an I156F mutation in TadA reference sequence, or a corresponding mutation in another adenosine deaminase.

[0344] In some embodiments, the adenosine deaminase comprises one, two, three, four, five, six, or seven mutations selected from the group consisting of L84X, A106X, D108X, H123X, D147X, E155X, and I156X in TadA reference sequence, or a corresponding mutation or mutations in another adenosine deaminase, where X indicates the presence of any amino acid other than the corresponding amino acid in the wild-type adenosine deaminase. In some embodiments, the adenosine deaminase comprises one, two, three, four, five, or six mutations selected from the group consisting of S2X, 149X, A106X, D108X, D147X, and E155X in TadA reference sequence, or a corresponding mutation or mutations in another adenosine deaminase, where X indicates the presence of any amino acid other than the corresponding amino acid in the wild-type adenosine deaminase. In some embodiments, the adenosine deaminase comprises one, two, three, four, or five mutations selected from the group consisting of H8X, A106X, D108X, N127X, and K160X in TadA reference sequence, or a corresponding mutation or mutations in another adenosine deaminase, where X indicates the presence of any amino acid other than the corresponding amino acid in the wild-type adenosine deaminase.

[0345] In some embodiments, the adenosine deaminase comprises one, two, three, four, five, six, or seven mutations selected from the group consisting of L84F, A106V, D108N, H123Y, D147Y, E155V, and 1156F in TadA reference sequence, or a corresponding mutation or mutations in another adenosine deaminase. In some embodiments, the adenosine deaminase comprises one, two, three, four, five, or six mutations selected from the group consisting of S2A, 149F, A106V, D108N, D147Y, and E155V in TadA reference sequence.

[0346] In some embodiments, the adenosine deaminase comprises one, two, three, four, or five mutations selected from the group consisting of H8Y, A106T, D108N, N127S, and K160S in TadA reference sequence, or a corresponding mutation or mutations in another adenosine deaminase.

[0347] In some embodiments, the adenosine deaminase comprises one or more of a E25X, R26X, R107X, A142X, and/or A143X mutation in TadA reference sequence, or one or more corresponding mutations in another adenosine deaminase, where the presence of X indicates any amino acid other than the corresponding amino acid in the wild-type adenosine deaminase. In some embodiments, the adenosine deaminase comprises one or more of E25M, E25D, E25A, E25R, E25V, E25S, E25Y, R26G, R26N, R26Q, R26C, R26L, R26K, R107P, R107K, R107A, R107N, R107W, R107H, R107S, A142N, A142D, A142G, A143D, A143G, A143E, A143L, A143W, A143M, A143S, A143Q, and/or A143R mutation in TadA reference sequence, or one or more corresponding mutations in another adenosine deaminase. In some embodiments, the adenosine deaminase comprises one or more of the mutations described herein corresponding to TadA reference sequence, or one or more corresponding mutations in another adenosine deaminase.

[0348] In some embodiments, the adenosine deaminase comprises an E25X mutation in TadA reference sequence, or a corresponding mutation in another adenosine deaminase, where X indicates any amino acid other than the corresponding amino acid in the wild-type adenosine deaminase. In some embodiments, the adenosine deaminase comprises an E25M, E25D, E25A, E25R, E25V, E25S, or E25Y mutation in TadA reference sequence, or a corresponding mutation in another adenosine deaminase (e.g., ecTadA).

[0349] In some embodiments, the adenosine deaminase comprises an R26X mutation in TadA reference sequence, or a corresponding mutation in another adenosine deaminase, where X indicates any amino acid other than the corresponding amino acid in the wild-type adenosine deaminase. In some embodiments, the adenosine deaminase comprises R26G, R26N, R26Q, R26C, R26L, or R26K mutation in TadA reference sequence, or a corresponding mutation in another adenosine deaminase (e.g., ecTadA).

[0350] In some embodiments, the adenosine deaminase comprises an R107X mutation in TadA reference sequence, or a corresponding mutation in another adenosine deaminase, where X indicates any amino acid other than the corresponding amino acid in the wild-type adenosine deaminase. In some embodiments, the adenosine deaminase comprises an R107P, R107K, R107A, R107N, R107W, R107H, or R107S mutation in TadA reference sequence, or a corresponding mutation in another adenosine deaminase (e.g., ecTadA).

[0351] In some embodiments, the adenosine deaminase comprises an A142X mutation in TadA reference sequence, or a corresponding mutation in another adenosine deaminase, where X indicates any amino acid other than the corresponding amino acid in the wild-type adenosine deaminase. In some embodiments, the adenosine deaminase comprises an A142N, A142D, A142G, mutation in TadA reference sequence, or a corresponding mutation in another adenosine deaminase (e.g., ecTadA).

[0352] In some embodiments, the adenosine deaminase comprises an A143X mutation in TadA reference sequence, or a corresponding mutation in another adenosine deaminase, where X indicates any amino acid other than the corresponding amino acid in the wild-type adenosine deaminase. In some embodiments, the adenosine deaminase comprises an A143D, A143G, A143E, A143L, A143W, A143M, A143S, A143Q, and/or A143R mutation in TadA reference sequence, or a corresponding mutation in another adenosine deaminase (e.g., ecTadA).

[0353] In some embodiments, the adenosine deaminase comprises one or more of a H36X, N37X, P48X, I49X, R51X, M70X, N72X, D77X, E134X, S146X, Q154X, K157X, and/or K161X mutation in TadA reference sequence, or one or more corresponding mutations in another adenosine deaminase, where the presence of X indicates any amino acid other than the corresponding amino acid in the wild-type adenosine deaminase. In some embodiments, the adenosine deaminase comprises one or more of H36L, N37T, N37S, P48T, P48L, I49V, R51H, R51L, M70L, N72S, D77G, E134G, S146R, S146C, Q154H, K157N, and/or K161T mutation in TadA reference sequence, or one or more corresponding mutations in another adenosine deaminase (e.g., ecTadA).

[0354] In some embodiments, the adenosine deaminase comprises an H36X mutation in TadA reference sequence, or a corresponding mutation in another adenosine deaminase, where X indicates any amino acid other than the corresponding amino acid in the wild-type adenosine deaminase. In some embodiments, the adenosine deaminase comprises an H36L mutation in TadA reference sequence, or a corresponding mutation in another adenosine deaminase.

[0355] In some embodiments, the adenosine deaminase comprises an N37X mutation in TadA reference sequence, or a corresponding mutation in another adenosine deaminase, where X indicates any amino acid other than the corresponding amino acid in the wild-type adenosine deaminase. In some embodiments, the adenosine deaminase comprises an N37T or N37S mutation in TadA reference sequence, or a corresponding mutation in another adenosine deaminase.

[0356] In some embodiments, the adenosine deaminase comprises an P48X mutation in TadA reference sequence, or a corresponding mutation in another adenosine deaminase, where X indicates any amino acid other than the corresponding amino acid in the wild-type adenosine deaminase. In some embodiments, the adenosine deaminase comprises an P48T or P48L mutation in TadA reference sequence, or a corresponding mutation in another adenosine deaminase.

[0357] In some embodiments, the adenosine deaminase comprises an R51X mutation in TadA reference sequence, or a corresponding mutation in another adenosine deaminase, where X indicates any amino acid other than the corresponding amino acid in the wild-type adenosine deaminase. In some embodiments, the adenosine deaminase comprises an R51H or R51L mutation in TadA reference sequence, or a corresponding mutation in another adenosine deaminase.

[0358] In some embodiments, the adenosine deaminase comprises an S146X mutation in TadA reference sequence, or a corresponding mutation in another adenosine deaminase, where X indicates any amino acid other than the corresponding amino acid in the wild-type adenosine deaminase. In some embodiments, the adenosine deaminase comprises an S146R or S146C mutation in TadA reference sequence, or a corresponding mutation in another adenosine deaminase.

[0359] In some embodiments, the adenosine deaminase comprises an K157X mutation in TadA reference sequence, or a corresponding mutation in another adenosine deaminase, where X indicates any amino acid other than the corresponding amino acid in the wild-type adenosine deaminase. In some embodiments, the adenosine deaminase comprises a K157N mutation in TadA reference sequence, or a corresponding mutation in another adenosine deaminase.

[0360] In some embodiments, the adenosine deaminase comprises an P48X mutation in TadA reference sequence, or a corresponding mutation in another adenosine deaminase, where X indicates any amino acid other than the corresponding amino acid in the wild-type adenosine deaminase. In some embodiments, the adenosine deaminase comprises a P48S, P48T, or P48A mutation in TadA reference sequence, or a corresponding mutation in another adenosine deaminase.

[0361] In some embodiments, the adenosine deaminase comprises an A142X mutation in TadA reference sequence, or a corresponding mutation in another adenosine deaminase, where X indicates any amino acid other than the corresponding amino acid in the wild-type adenosine deaminase. In some embodiments, the adenosine deaminase comprises a A142N mutation in TadA reference sequence, or a corresponding mutation in another adenosine deaminase.

[0362] In some embodiments, the adenosine deaminase comprises an W23X mutation in TadA reference sequence, or a corresponding mutation in another adenosine deaminase, where X indicates any amino acid other than the corresponding amino acid in the wild-type adenosine deaminase. In some embodiments, the adenosine deaminase comprises a W23R or W23L mutation in TadA reference sequence, or a corresponding mutation in another adenosine deaminase.

[0363] In some embodiments, the adenosine deaminase comprises an R152X mutation in TadA reference sequence, or a corresponding mutation in another adenosine deaminase, where X indicates any amino acid other than the corresponding amino acid in the wild-type adenosine deaminase. In some embodiments, the adenosine deaminase comprises a R152P or R52H mutation in TadA reference sequence, or a corresponding mutation in another adenosine deaminase.

[0364] In one embodiment, the adenosine deaminase may comprise the mutations H36L, R51L, L84F, A106V, D108N, H123Y, S146C, D147Y, E155V, I156F, and K157N. In some embodiments, the adenosine deaminase comprises the following combination of mutations relative to TadA reference sequence, where each mutation of a combination is separated by a “_” and each combination of mutations is between parentheses:

### (A106V_D108N),

### (R107C_D108N),

### (H8Y_D108N_N127S_D147Y_Q154H),

### (H8Y_D108N_N127S_D147Y_E155V),

### (D108N_D147Y_E155V),

### (H8Y_D108N_N127S),

### (H8Y_D108N_N127S_D147Y_Q154H),

### (A106V_D108N_D147Y_E155V),

### (D108Q_D147Y_E155V),

### (D108M_D147Y_E155V),

### (D108L_D147Y_E155V),

### (D108K_D147Y_E155V),

### (D108I_D147Y_E155V),

### (D108F_D147Y_E155V),

### (A106V_D108N_D147Y),

### (A106V_D108M_D147Y_E155V),

### (E59A_A106V_D108N_D147Y_E155V),

[0365] (E59A cat dead_A106V_D108N_D147Y_E155V),

### (L84F_A106V_D108N_H123Y_D147Y_E155V_I156Y),

### (L84F_A106V_D108N_H123Y_D147Y_E155V_I156F),

### (D103A_D104N),

### (G22P_D103A_D104N),

### (D103A_D104N_S138A),

### (R26G_L84F_A106V_R107H_D108N_H123Y_A142N_A143D_D147Y_E155V_I56F),

### (E25G_R26G_L84F_A106V_R107H_D108N_H123Y_A142N_A143D_D147Y_E155V_I156F),

### (E25D_R26G_L84F_A106V_R107K_D108N_H123Y_A142N_A143G_D147Y_E155V_I156F),

### (R26Q_L84F_A106V_D108N_H123Y_A142N_D147Y_E155V_I156F),

### (E25M_R26G_L84F_A106V_R107P_D108N_H123Y_A142N_A143D_D147Y_E155V_I156F),

### (R26C_L84F_A106V_R107H_D108N_H123Y_A142N_D147Y_E155V_I156F),

### (L84F_A106V_D108N_H123Y_A142N_A143L_D147Y_E155V_I156F),

### (R26G_L84F_A106V_D108N_H123Y_A142N_D147Y_E155V_I156F),

### (E25A_R26G_L84F_A106V_R107N_D108N_H123Y_A142N_A143E_D147Y_E155V_I156F),

### (R26G_L84F_A106V_R107H_D108N_H123Y_A142N_A143D_D147Y_E155V_I156F).

### (A106V_D108N_A142N_D147Y_E155V),

### (R26G_A106V_D108N_A142N_D147Y_E155V),

### (E25D_R26G_A106V_R107K_D108N_A142N_A143G_D147Y_E155V),

### (R26G_A106V_D108N_R107H_A142N_A 143D_D147Y_E155V),

### (E25D_R26G_A106V_D108N_A142N_D147Y_E155V),

### (A106V_R107K_D108N_A142N_D147Y_E155V),

### (A106V_D108N_A142N_A143G_D147Y_E155V),

### (A106V_D108N_A142N_A143L_D147Y_E155V).

### (H36L_R51L_L84F_A106V_D108N_H123Y_S146C_D147Y_E155V_I156F_K157N),

### (N37T_P48T_M70L_L84F_A106V_D108N_H123Y_D147Y_149V_E155V_I156F),

### (N37S_L84F_A106V_D108N_H123Y_D147Y_E155V_I156F_K161T),

### (H36L_L84F_A106V_D108N_H123Y_D147Y_Q154H_E155V_I156F),

### (N72S_L84F_A106V_D108N_H123Y_S146R_D147Y_E155V_I156F),

### (H36L_P48L_L84F_A106V_D108N_H123Y_E134G_D147Y_E155V_I156F),

### (H36L_L84F_A106V_D108N_H123Y_D147Y_E155V_I156F_K157N)

### (H36L_L84F_A106V_D108N_H123Y_S146C_D147Y_E155V_I156F),

### (L84F_A106V_D108N_H123Y_S146R_D147Y_E155V_I156F_K161T),

### (N37S_R51H_D77G_L84F_A106V_D108N_H123Y_D147Y_E155V_I156F),

### (R51L_L84F_A106V_D108N_H123Y_D147Y_E155V_I156F_K157N),

### (D24G_Q71R_L84F_H96L_A106V_D108N_H123Y_D147Y_E155V_I156F_K160E),

### (H36L_G67V_L84F_A106V_D108N_H123Y_S146T_D147Y_E155V_I156F),

### (Q71L_L84F_A106V_D108N_H123Y_L137M_A143E_D147Y_E15V_I156F),

### (E25G_L84F_A106V_D108N_H123Y_D147Y_E155V_I156F_Q159L),

### (L84F_A91T_F1041_A106V_D108N_H123Y_D147Y_E155V_I156F),

### (N72D_L84F_A106V_D108N_H123Y_G125A_D147Y_E155V_I156F),

### (P48S_L84F_S97C_A106V_D108N_H123Y_D147Y_E155V_I156F),

### (W23G_L84F_A106V_D108N_H123Y_D147Y_E155V_I156F),

### (D24G_P48L_Q71R_L84F_A106V_D108N_H123Y_D147Y_E155V_I156F_Q159L),

### (L84F_A106V_D108N_H123Y_A142N_D147Y_E155V_I156F),

### (H36L_R51L_L84F_A106V_D108N_H123Y_A142N_S146C_D147Y_E155V_I156F_K157N),

### (N37S_L84F_A106V_D108N_H123Y_A142N_D147Y_E155V_I156F_K161T).

### (L84F_A106V_D108N_D147Y_E155V_I156F),

### (RS1L_L84F_A106V_D108N_H123Y_S146C_D147Y_E155V_I156F_K157N_K161T),

### (L84F_A106V_D108N_H123Y_S146C_D147Y_E155V_I156F_K161T),

### (L84F_A106V_D108N_H123Y_S146C_D147Y_E155V_I156F_K157N_K160E_K161T),

### (L84F_A106V_D108N_H123Y_S146C_D147Y_E155V_I156F_K157N_K160E),

### (R74Q_L84F_A106V_D108N_H123Y_D147Y_E155V_I156F),

### (R74A_L84F_A I06V_D108N_H123Y_D147Y_E155V_I156F),

### (L84F_A16V_D108N_H123Y_D147Y_E155V_I156F),

### (R74Q_L84F_A106V_D108N_H123Y_D147Y_E155V_I156F),

### (L84F_R98Q_A106V_D108N_H123Y_D147Y_E155V_I156F),

### (L84F_A106V_D108N_H123Y_R129Q_D147Y_E155V_I156F),

### (P48S_L84F_A106V_D108N_H123Y_A142N_D147Y_E155V_I156F), (P48S_A142N),

### (P48T_I49V_L84F_A106V_D108N_H123Y_A142N_D147Y_E155V_I156F_L157N), (P48T_149V_A142N),

### (H36L_P48S_R51L_L84F_A106V_D108N_H123Y_S146C_D147Y_E155V_I156F_K157N),

### (H36L_P48S_R51L_L84F_A106V_D108N_H123Y_S146C_A142N_D147Y_E155V_I156F

### (H36L_P48T_149V_R51L_L84F_A106V_D108N_H123Y_S146C_D147Y_E155V_I156F_K157N),

### (H36L_P48T_149V_R51L_L84F_A106V_D108N_H123Y_A142N_S146C_D147Y_E155V_I156F_K157N),

### (H36L_P48A_R51L_L84F_A106V_D108N_H123Y_S146C_D147Y_E155V_I156F_K157N),

### (H36L_P48A_R51L_L84F_A106V_D108N_H123Y_A142N_S146C_D147Y_E155V_I156F_K157N),

### (H36L_P48A_R51L_L84F_A106V_D108N_H123Y_S146C_A142N_D147Y_E155V_I156F_K157N).

### (W23L_H36L_P48A_R51L_L84F_A106V_D108N_H123Y_S146C_D147Y_E155V_I156F_K157N),

### (W23R_H36L_P48A_R51L_L84F_A106V_D108N_H123Y_S146C_D147Y_E155V_I156F_K157N),

### (W23L_H36L_P48A_R51L_L84F_A106V_D108N_H123Y_S146R_D147Y_E155V_I156F_K161T),

### (H36L_P48A_R51L_L84F_A106V_D108N_H123Y_S146C_D147Y_R152H_E155V_I156F_K157N),

### (H36L_P48A_R51L_L84F_A106V_D108N_H123Y_S146C_D147Y_R152P_E155V_I156F_K157N),

### (W23L_H36L_P48A_R51L_L84F_A106V_D108N_H123Y_S146C_D147Y_R152P_E155V_I156F_K157N),

### (W23L_H36L_P48A_R51L_L84F_A106V_D108N_H123Y_A142A_S146C_D147Y_E155V_I156F_K157N),

### (W23L_H36L_P48A_R51L_L84F_A106V_D108N_H123Y_A142A_S146C_D147Y_R152P_E155V_I156F_K157N),

### (W23L_H36L_P48A_R51L_L84F_A106V_D108N_H123Y_S146R_D147Y_E155V_I156F_K161T),

### (W23R_H36L_P48A_R51L_L84F_A106V_D108N_H123Y_S146C_D147Y_R152P_E155V_I156F_K157N),

### (H36L_P48A_R51L_L84F_A106V_D108N_H123Y_A142N_S146C_D147Y_R152P_E155V_I156F_K157N).

[0366] In some embodiments, the TadA deaminase is TadA variant. In some embodiments, the TadA variant is TadA*7.10. In particular embodiments, the fusion proteins comprise a single TadA*7.10 domain (e.g., provided as a monomer). In other embodiments, the fusion protein comprises TadA*7.10 and TadA(wt), which are capable of forming heterodimers. In one embodiment, a fusion protein of the invention comprises a wild-type TadA linked to TadA*7.10, which is linked to Cas9 nickase.

[0367] In some embodiments, TadA*7.10 comprises at least one alteration. In some embodiments, the adenosine deaminase comprises an alteration in the following sequence:

TadA*7.10
(SEQ ID NO: 3)
MSEVEFSHEYWMRHALTLAKRARDEREVPVGAVLVLNNRVIGEGWNRAI
GLHDPTAHAEIMALRQGGLVMQNYRLIDATLYVTFEPCVMCAGAMIHSR
IGRVVFGVRNAKTGAAGSLMDVLHYPGMNHRVEITEGILADECAALLCY
FFRMPRQVFNAQKKAQSSTD

[0368] In some embodiments, TadA*7.10 comprises an alteration at amino acid 82 and/or 166. In particular embodiments, TadA*7.10 comprises one or more of the following alterations: Y147T, Y147R, Q154S, Y123H, V82S, T166R, and/or Q154R. In other embodiments, a variant of TadA*7.10 comprises a combination of alterations selected from the group of: Y147T+Q154R; Y147T+Q154S; Y147R+Q154S; V82S+Q154S; V82S+Y147R; V82S+Q154R; V82S+Y123H; 176Y+V82S; V82S+Y123H+Y147T; V82S+Y123H+Y147R; V82S+Y123H+Q154R; Y147R+Q154R+Y123H; Y147R+Q154R+I76Y; Y147R+Q154R+T166R; Y123H+Y147R+Q154R+I76Y; V82S+Y123H+Y147R+Q154R; and 176Y+V82S+Y123H+Y147R+Q154R.

[0369] In some embodiments, an adenosine deaminase variant (e.g., TadA*8) comprises a deletion. In some embodiments, an adenosine deaminase variant comprises a deletion of the C terminus. In particular embodiments, an adenosine deaminase variant comprises a deletion of the C terminus beginning at residue 149, 150, 151, 152, 153, 154, 155, 156, and 157, relative to TadA*7.10, the TadA reference sequence, or a corresponding mutation in another TadA.

[0370] In other embodiments, an adenosine deaminase variant (e.g., TadA*8) is a monomer comprising one or more of the following alterations: Y147T, Y147R, Q154S, Y123H, V82S, T166R, and/or Q154R, relative to TadA*7.10, the TadA reference sequence, or a corresponding mutation in another TadA. In other embodiments, the adenosine deaminase variant (TadA*8) is a monomer comprising a combination of alterations selected from the group of: Y147T+Q154R; Y147T+Q154S; Y147R+Q154S; V82S+Q154S; V82S+Y147R; V82S+Q154R; V82S+Y123H; 176Y+V82S; V82S+Y123H+Y147T; V82S+Y123H+Y147R; V82S+Y123H+Q154R; Y147R+Q154R+Y123H, Y147R+Q154R+176Y; Y147R+Q154R+T166R; Y123H+Y147R+Q154R+I76Y; V82S+Y123H+Y147R+Q154R; and I76Y+V82S+Y123H+Y147R+Q154R, relative to TadA*7.10, the TadA reference sequence, or a corresponding mutation in another TadA.

[0371] In other embodiments, the adenosine deaminase variant is a homodimer comprising two adenosine deaminase domains (e.g., TadA*8) each having one or more of the following alterations Y147T, Y147R, Q154S, Y123H, V82S, T166R, and/or Q154R, relative to TadA*7.10, the TadA reference sequence, or a corresponding mutation in another TadA. In other embodiments, the adenosine deaminase variant is a homodimer comprising two adenosine deaminase domains (e.g., TadA*8) each having a combination of alterations selected from the group of: Y147T+Q154R; Y147T+Q154S; Y147R+Q154S; V82S+Q154S; V82S+Y147R; V82S+Q154R; V82S+Y123H; I76Y+V82S; V82S+Y123H+Y147T; V82S+Y123H+Y147R; V82S+Y123H+Q154R; Y147R+Q154R+Y123H; Y147R+Q154R+176Y; Y147R+Q154R+T166R; Y123H+Y147R+Q154R+I76Y; V82S+Y123H+Y147R+Q154R; and I76Y+V82S+Y123H+Y147R+Q154R, relative to TadA*7.10, the TadA reference sequence, or a corresponding mutation in another TadA.

[0372] In other embodiments, the adenosine deaminase variant is a heterodimer of a wild-type adenosine deaminase domain and an adenosine deaminase variant domain (e.g., TadA*8) comprising one or more of the following alterations Y147T, Y147R, Q154S, Y123H, V82S, T166R, and/or Q154R, relative to TadA*7.10, the TadA reference sequence, or a corresponding mutation in another TadA. In other embodiments, the adenosine deaminase variant is a heterodimer of a wild-type adenosine deaminase domain and an adenosine deaminase variant domain (e.g., TadA*8) comprising a combination of alterations selected from the group of: Y147T+Q154R; Y147T+Q154S; Y147R+Q154S; V82S+Q154S; V82S+Y147R; V82S+Q154R; V82S+Y123H; I76Y+V82S; V82S+Y123H+Y147T; V82S+Y123H+Y147R; V82S+Y123H+Q154R; Y147R+Q154R+Y123H; Y147R+Q154R+176Y; Y147R+Q154R+T166R; Y123H+Y147R+Q154R+I76Y; V82S+Y123H+Y147R+Q154R; and I76Y+V82S+Y123H+Y147R+Q154R, relative to TadA*7.10, the TadA reference sequence, or a corresponding mutation in another TadA.

[0373] In other embodiments, the adenosine deaminase variant is a heterodimer of a TadA*7.10 domain and an adenosine deaminase variant domain (e.g., TadA*8) comprising one or more of the following alterations Y147T, Y147R, Q154S, Y123H, V82S, T166R, and/or Q154R, relative to TadA*7.10, the TadA reference sequence, or a corresponding mutation in another TadA. In other embodiments, the adenosine deaminase variant is a heterodimer of a TadA*7.10 domain and an adenosine deaminase variant domain (e.g., TadA*8) comprising a combination of alterations selected from the group of: Y147T+Q154R; Y147T+Q154S; Y147R+Q154S; V82S+Q154S; V82S+Y147R; V82S+Q154R; V82S+Y123H; I76Y+V82S; V82S+Y123H+Y147T; V82S+Y123H+Y147R; V82S+Y123H+Q154R; Y147R+Q154R+Y123H; Y147R+Q154R+I76Y; Y147R+Q154R+T166R; Y123H+Y147R+Q154R+176Y; V82S+Y123H+Y147R+Q154R; and I76Y+V82S+Y123H+Y147R+Q154R, relative to TadA*7.10, the TadA reference sequence, or a corresponding mutation in another TadA.

[0374] In particular embodiments, an adenosine deaminase heterodimer comprises a TadA*8 domain and an adenosine deaminase domain selected from Staphylococcus aureus (S. aureus) TadA, Bacillus subtilis (B. subtilis) TadA, Salmonella typhimurium (S. typhimurium) TadA, Shewanella putrefaciens (S. putrefaciens) TadA, Haemophilus influenzae F3031 (H. influenzae) TadA, Caulobacter crescentus (C. crescentus) TadA, Geobacter sulfurreducens (G. sulfurreducens) TadA, or TadA*7.10.

[0375] In some embodiments, an adenosine deaminase is a TadA*8. In one embodiment, an adenosine deaminase is a TadA*8 that comprises or consists essentially of the following sequence or a fragment thereof having adenosine deaminase activity:

(SEQ ID NO: 242)
MSEVEFSHEYWMRHALTLAKRARDEREVPVGAVLVLNNRVIGEGWNRAI
GLHDPTAHAEIMALRQGGLVMQNYRLIDATLYVTFEPCVMCAGAMIHSR
IGRVVFGVRNAKTGAAGSIMDVLHYPGMNHRVEITEGILADECAALLCT
FFRMPRQVFNAQKKAQSSTD

[0376] In some embodiments, the TadA*8 is truncated. In some embodiments, the truncated TadA*8 is missing 1, 2, 3, 4, 5, 6, 7, 8, 9, 10, 11, 12, 13, 14, 15, 6, 17, 18, 19, or 20 N-terminal amino acid residues relative to the full length TadA*8. In some embodiments, the truncated TadA*8 is missing 1, 2, 3, 4, 5, 6, 7, 8, 9, 10, 11, 12, 13, 14, 15, 6, 17, 18, 19, or 20 C-terminal amino acid residues relative to the full length TadA*8. In some embodiments the adenosine deaminase variant is a full-length TadA*8.

[0377] In some embodiments the TadA*8 is TadA*8.1, TadA*8.2, TadA*8.3, TadA*8.4, TadA*8.5, TadA*8.6, TadA*8.7, TadA*8.8, TadA*8.9, TadA*8.10, TadA*8.11, TadA*8.12, TadA*8.13, TadA*8.14, TadA*8.15, TadA*8.16, TadA*8.17, TadA*8.18, TadA*8.19, TadA*8.20, TadA*8.21, TadA*8.22, TadA*8.23, or TadA*8.24.

[0378] In other embodiments, a base editor of the disclosure comprising an adenosine deaminase variant (e.g., TadA*8) monomer comprising one or more of the following alterations: R26C, V88A, A109S, T111R, D119N, H122N, Y147D, F149Y, T166I and/or D167N, relative to TadA*7.10, the TadA reference sequence, or a corresponding mutation in another TadA. In other embodiments, the adenosine deaminase variant (TadA*8) monomer comprises a combination of alterations selected from the group of: R26C+A109S+T111R+D119N+H122N+Y147D+F149Y+T166I+D167N; V88A+A109S+T111R+D119N+H122N+F149Y+T166I+D167N; R26C+A109S+T111R+D119N+H122N+F149Y+T166I+D167N; V88A+T111R+D119N+F149Y; and A109S+T111R+D119N+H122N+Y147D+F149Y+T166I+D167N, relative to TadA*7.10, the TadA reference sequence, or a corresponding mutation in another TadA.

[0379] In other embodiments, a base editor comprises a heterodimer of a wild-type adenosine deaminase domain and an adenosine deaminase variant domain (e.g., TadA*8) comprising one or more of the following alterations R26C, V88A, A109S, T111R, D119N, H122N, Y147D, F149Y, T166I and/or D167N, relative to TadA*7.10, the TadA reference sequence, or a corresponding mutation in another TadA. In other embodiments, the base editor comprises a heterodimer of a wild-type adenosine deaminase domain and an adenosine deaminase variant domain (e.g., TadA*8) comprising a combination of alterations selected from the group of: R26C+A109S+T111R+D119N+H122N+Y147D+F149Y+T166I+D167N; V88A+A109S+T111R+D119N+H122N+F149Y+T166I+D167N; R26C+A109S+T111R+D119N+H122N+F149Y+T166I+D167N; V88A+T1I1R+D119N+F149Y; and A109S+T111R+D119N+H122N+Y147D+F149Y+T166I+D167N, relative to TadA*7.10, the TadA reference sequence, or a corresponding mutation in another TadA.

[0380] In other embodiments, a base editor comprises a heterodimer of a TadA*7.10 domain and an adenosine deaminase variant domain (e.g., TadA*8) comprising one or more of the following alterations R26C, V88A, A109S, T111R, D119N, H122N, Y147D, F149Y, T166I and/or D167N, relative to TadA*7.10, the TadA reference sequence, or a corresponding mutation in another TadA. In other embodiments, the base editor comprises a heterodimer of a TadA*7.10 domain and an adenosine deaminase variant domain (e.g., TadA*8) comprising a combination of alterations selected from the group of: R26C+A109S+T111R+D119N+H122N+Y147D+F149Y+T166I+D167N; V88A+A109S+T111R+D119N+H122N+F149Y+T166I+D167N; R26C+A109S+T111R+D119N+H122N+F149Y+T166I+D167N; V88A+T111R+D119N+F149Y; and A109S+T111R+D119N+H122N+Y147D+F149Y+T166I+D167N, relative to TadA*7.10, the TadA reference sequence, or a corresponding mutation in another TadA.

[0381] In some embodiments, the TadA*8 is a variant as shown in Table 6. Table 6 shows certain amino acid position numbers in the TadA amino acid sequence and the amino acids present in those positions in the TadA-7.10 adenosine deaminase. Table 6 also shows amino acid changes in TadA variants relative to TadA-7.10 following phage-assisted non-continuous evolution (PANCE) and phage-assisted continuous evolution (PACE), as described in M. Richter et al., 2020, Nature Biotechnology, doi.org/10.1038/s41587-020-0453-z, the entire contents of which are incorporated by reference herein. In some embodiments, the TadA*8 is TadA*8a, TadA*8b, TadA*8c, TadA*8d, or TadA*8e. In some embodiments, the TadA*8 is TadA*8e.

TABLE 6
Select TadA*8 Variants

| | | TadA amino acid number | | | | | | | | | |
|---|---|---|---|---|---|---|---|---|---|---|---|
| | TadA | 26 | 88 | 109 | 111 | 119 | 122 | 147 | 149 | 166 | 167 |
| | TadA- | R | V | A | T | D | H | Y | F | T | D |
| | 7.10 | | | | | | | | | | |
| PANCE | | | | | R | | | | | | |
| 1 | | | | | | | | | | | |
| PANCE | | | | S/T | R | | | | | | |
| 2 | | | | | | | | | | | |
| PACE | TadA-8a | C | | S | R | N | N | D | Y | I | N |
| | TadA-8b | | A | S | R | N | N | | Y | I | N |
| | TadA-8c | C | | S | R | N | N | | Y | I | N |
| | TadA-8d | | A | | R | N | | | Y | | |
| | TadA-8e | | | S | R | N | N | D | Y | I | N |

[0382] In one embodiment, a fusion protein of the invention comprises a wild-type TadA is linked to an adenosine deaminase variant described herein (e.g., TadA*8), which is linked to Cas9 nickase. In particular embodiments, the fusion proteins comprise a single TadA*8 domain (e.g., provided as a monomer). In other embodiments, the fusion protein comprises TadA*8 and TadA(wt), which are capable of forming heterodimers.

[0383] In some embodiments, the adenosine deaminase comprises an amino acid sequence that is at least 60%, at least 65%, at least 70%, at least 75%, at least 80%, at least 85%, at least 90%, at least 95%, at least 96%, at least 97%, at least 98%, at least 99%, or at least 99.5% identical to any one of the amino acid sequences set forth in any of the adenosine deaminases provided herein. It should be appreciated that adenosine deaminases provided herein may include one or more mutations (e.g., any of the mutations provided herein). The disclosure provides any deaminase domains with a certain percent identity plus any of the mutations or combinations thereof described herein. In some embodiments, the adenosine deaminase comprises an amino acid sequence that has 1, 2, 3, 4, 5, 6, 7, 8, 9, 10, 11, 12, 13, 14, 15, 16, 17, 18, 19, 20, 21, 22, 21, 24, 25, 26, 27, 28, 29, 30, 31, 32, 33, 34, 35, 36, 37, 38, 39, 40, 41, 42, 43, 44, 45, 46, 47, 48, 49, 50, or more mutations compared to a reference sequence, or any of the adenosine deaminases provided herein. In some embodiments, the adenosine deaminase comprises an amino acid sequence that has at least 5, at least 10, at least 15, at least 20, at least 25, at least 30, at least 35, at least 40, at least 45, at least 50, at least 60, at least 70, at least 80, at least 90, at least 100, at least 110, at least 120, at least 130, at least 140, at least 150, at least 160, or at least 170 identical contiguous amino acid residues as compared to any one of the amino acid sequences known in the art or described herein.

[0384] In particular embodiments, a TadA*8 comprises one or more mutations at any of the following positions shown in bold. In other embodiments, a TadA*8 comprises one or more mutations at any of the positions shown with underlining:

(SEQ ID NO: 3)
MSEVEFSHEY WMRHALTLAK RARDEREVPV GAVLVLNNRV IGEGWNRAIG ⁵⁰
LHDPTAHAEI MALRQGGLVM QNYRLIDATL YVTFEPCVMC AGAMIHSRIG ¹⁰⁰
RVVFGVRNAK TGAAGSLMDV LHYPGMNHRV EITEGILADE CAALLCYFFR ¹⁵⁰
MPRQVFNAQK KAQSSTD

[0385] For example, the TadA*8 comprises alterations at amino acid position 82 and/or 166 (e.g., V82S, T166R) alone or in combination with any one or more of the following Y147T, Y147R, Q154S, Y123H, and/or Q154R, relative to TadA*7.10, the TadA reference sequence, or a corresponding mutation in another TadA. In particular embodiments, a combination of alterations is selected from the group of: Y147T+Q154R: Y147T+Q154S; Y147R+Q154S; V82S+Q154S; V82S+Y147R; V82S+Q154R; V82S+Y123H; 176Y+V82S; V82S+Y123H+Y147T; V82S+Y123H+Y147R; V82S+Y123H+Q154R; Y147R+Q154R+Y123H; Y147R+Q154R+I76Y; Y147R+Q154R+T166R; Y123H+Y147R+Q154R+176Y; V82S+Y123H+Y147R+Q154R; and I76Y+V82S+Y123H+Y147R+Q154R, relative to TadA*7.10, the TadA reference sequence, or a corresponding mutation in another TadA.

[0386] In some embodiments, the TadA*8 is truncated. In some embodiments, the truncated TadA*8 is missing 1, 2, 3, 4, 5, 6, 7, 8, 9, 10, 11, 12, 13, 14, 15, 6, 17, 18, 19, or 20 N-terminal amino acid residues relative to the full length TadA*8. In some embodiments, the truncated TadA*8 is missing 1, 2, 3, 4, 5, 6, 7, 8, 9, 10, 11, 12, 13, 14, 15, 6, 17, 18, 19, or 20 C-terminal amino acid residues relative to the full length TadA*8. In some embodiments the adenosine deaminase variant is a full-length TadA*8.

[0387] In one embodiment, a fusion protein of the invention comprises a wild-type TadA is linked to an adenosine deaminase variant described herein (e.g., TadA*8), which is linked to Cas9 nickase. In particular embodiments, the fusion proteins comprise a single TadA*8 domain (e.g., provided as a monomer). In other embodiments, the base editor comprises TadA*8 and TadA(wt), which are capable of forming heterodimers.

[0388] In particular embodiments, the fusion proteins comprise a single (e.g., provided as a monomer) TadA*8. In some embodiments, the TadA*8 is linked to a Cas9 nickase. In some embodiments, the fusion proteins of the invention comprise as a heterodimer of a wild-type TadA (TadA(wt)) linked to a TadA*8. In other embodiments, the fusion proteins of the invention comprise as a heterodimer of a TadA*7.10 linked to a TadA*8. In some embodiments, the base editor is ABE8 comprising a TadA*8 variant monomer. In some embodiments, the base editor is ABE8 comprising a heterodimer of a TadA*8 and a TadA(wt). In some embodiments, the base editor is ABE8 comprising a heterodimer of a TadA*8 and TadA*7.10. In some embodiments, the base editor is ABE8 comprising a heterodimer of a TadA*8. In some embodiments, the TadA*8 is selected from Table 6, 12, or 13. In some embodiments, the ABE8 is selected from Table 12, 13, or 15.

[0389] In some embodiments, the adenosine deaminase is a TadA*9 variant. In some embodiments, the adenosine deaminase is a TadA*9 variant selected from the variants described below and with reference to the following sequence (termed TadA*7.10):

(SEQ ID NO: 3)
MSEVEFSHEY WMRHALTLAK RARDEREVPV GAVLVLNNRV
IGEGWNRAIG LHDPTAHAEI MALRQGGLVM QNYRLIDATL
YVTFEPCVMC AGAMIHSRIG RVVFGVRNAK TGAAGSLMDV
LHYPGMNHRV EITEGILADE CAALLCYFFR MPRQVFNAQK KAQSSTD

[0390] In some embodiments, an adenosine deaminase comprises one or more of the following alterations: R21N, R23H, E25F, N38G, L51W, P54C, M70V, Q71M, N72K, Y73S, V82T, M94V, P124W, T133K, D139L, D139M, C146R, and A158K. The one or more alternations are shown in the sequence above in underlining and bold font.

[0391] In some embodiments, an adenosine deaminase comprises one or more of the following combinations of alterations: V82S+Q154R+Y147R; V82S+Q154R+Y123H; V82S+Q154R+Y147R+Y123H; Q154R+Y147R+Y123H+I76Y+V82S; V82S+I76Y; V82S+Y147R; V82S+Y147R+Y123H; V82S+Q154R+Y123H; Q154R+Y147R+Y123H+176Y; V82S+Y147R; V82S+Y147R+Y123H; V82S+Q154R+Y123H; V82S+Q154R+Y147R; V82S+Q154R+Y147R; Q154R+Y147R+Y123H+I76Y; Q154R+Y147R+Y123H+176Y+V82S; 176Y_V82S_Y123H_Y147R_Q154R; Y147R+Q154R+H123H; and V82S+Q154R.

[0392] In some embodiments, an adenosine deaminase comprises one or more of the following combinations of alterations: E25F+V82S+Y123H, T133K+Y147R+Q154R; E25F+V82S+Y123H+Y147R+Q154R; L51W+V82S+Y123H+C146R+Y147R+Q154R; Y73S+V82S+Y123H+Y147R+Q154R; P54C+V82S+Y123H+Y147R+Q154R; N38G+V82T+Y123H+Y147R+Q154R; N72K+V82S+Y123H+D139L+Y147R+Q154R; E25F+V82S+Y123H+D139M+Y147R+Q154R; Q71M+V82S+Y123H+Y147R+Q154R; E25F+V82S+Y123H+T133K+Y147R+Q154R; E25F+V82S+Y123H+Y147R+Q154R; V82S+Y123H+P124W+Y147R+Q154R; L51 W+V82S+Y123H+C146R+Y147R+Q154R; P54C+V82S+Y123H+Y147R+Q154R; Y73S+V82S+Y123H+Y147R+Q154R; N38G+V82T+Y123H+Y147R+Q154R, R23H+V82S+Y123H+Y147R+Q154R; R21N+V82S+Y123H+Y147R+Q154R; V82S+Y123H+Y147R+Q154R+A158K; N72K+V82S+Y123H+D139L+Y147R+Q154R; E25F+V82S+Y123H+D139M+Y147R+Q154R; and M70V+V82S+M94V+Y123H+Y147R+Q154R

[0393] In some embodiments, an adenosine deaminase comprises one or more of the following combinations of alterations: Q71M+V82S+Y123H+Y147R+Q154R; E25F+I76Y+V82S+Y123H+Y147R+Q154R; I76Y+V82T+Y123H+Y147R+Q154R; N38G+I76Y+V82S+Y123H+Y147R+Q154R; R23H+I76Y+V82S+Y123H+Y147R+Q154R; P54C+I76Y+V82S+Y123H+Y147R+Q154R; R21N+176Y+V82S+Y123H+Y147R+Q154R; 176Y+V82S+Y123H+D139M+Y147R+Q154R; Y73S+I76Y+V82S+Y123H+Y147R+Q154R; E25F+I76Y+V82S+Y123H+Y147R+Q154R; 176Y+V82T+Y123H+Y147R+Q154R; N38G+176Y+V82S+Y123H+Y147R+Q154R; R23H+I76Y+V82S+Y123H+Y147R+Q154R; P54C+176Y+V82S+Y123H+Y147R+Q154R; R21N+176Y+V82S+Y123H+Y147R+Q154R; I76Y+V82S+Y123H+D139M+Y147R+Q154R; Y73S+176Y+V82S+Y123H+Y147R+Q154R; and V82S+Q154R, N72K_V82S+Y123H+Y147R+Q154R; Q71M_V82S+Y123H+Y147R+Q154R; V82S+Y123H+T133K+Y147R+Q154R; V82S+Y123H+T133K+Y147R+Q154R+A158K; M70V+Q71M+N72K+V82S+Y123H+Y147R+Q154R; N72K_V82S+Y123H+Y147R+Q154R; Q71M_V82S+Y123H+Y147R+Q154R; M70V+V82S+M94V+Y123H+Y147R+Q154R; V82S+Y123H+T133K+Y147R+Q154R; V82S+Y123H+T133K+Y147R+Q154R+A158K; and M70V+Q71M+N72K+V82S+Y123H+Y147R+Q154R. In some embodiments, the adenosine deaminase is expressed as a monomer. In other embodiments, the adenosine deaminase is expressed as a heterodimer.

[0394] In some embodiments, the deaminase or other polypeptide sequence lacks a methionine, for example when included as a component of a fusion protein. This can alter the numbering of positions. However, the skilled person will understand that such corresponding mutations refer to the same mutation, e.g., Y73S and Y72S and D139M and D138M.

[0395] In some embodiments, the TadA*9 variant comprises the alterations described in Table 16 as described herein. In some embodiments, the TadA*9 variant is a monomer.

[0396] In some embodiments, the TadA*9 variant is a heterodimer with a wild-type TadA adenosine deaminase. In some embodiments, the TadA*9 variant is a heterodimer with another TadA variant (e.g., TadA*8, TadA*9). Additional details of TadA*9 adenosine deaminases are described in International PCT Application No. PCT/2020/049975, which is incorporated herein by reference for its entirety.

[0397] Any of the mutations provided herein and any additional mutations (e.g., based on the ecTadA amino acid sequence) can be introduced into any other adenosine deaminases.

[0398] Any of the mutations provided herein can be made individually or in any combination in TadA reference sequence or another adenosine deaminase (e.g., ecTadA).

[0399] Details of A to G nucleobase editing proteins are described in International PCT Application No. PCT/2017/045381 (WO2018/027078) and Gaudelli, N. M., el al., “Programmable base editing of A⋅T to G⋅C in genomic DNA without DNA cleavage” Nature, 551, 464-471 (2017), the entire contents of which are hereby incorporated by reference.

[0400] Guide Polynucleotides A polynucleotide programmable nucleotide binding domain, when in conjunction with a bound guide polynucleotide (e.g., gRNA), can specifically bind to a target polynucleotide sequence (i.e., via complementary base pairing between bases of the bound guide nucleic acid and bases of the target polynucleotide sequence) and thereby localize the base editor to the target nucleic acid sequence desired to be edited. In some embodiments, the target polynucleotide sequence comprises single-stranded DNA or double-stranded DNA. In some embodiments, the target polynucleotide sequence comprises RNA. In some embodiments, the target polynucleotide sequence comprises a DNA-RNA hybrid.

[0401] CRISPR is an adaptive immune system that provides protection against mobile genetic elements (viruses, transposable elements and conjugative plasmids). CRISPR clusters contain spacers, sequences complementary to antecedent mobile elements, and target invading nucleic acids. CRISPR clusters are transcribed and processed into CRISPR RNA (crRNA). In type I1 CRISPR systems, correct processing of pre-crRNA requires a trans-encoded small RNA (tracrRNA), endogenous ribonuclease 3 (rnc) and a Cas9 protein. The tracrRNA serves as a guide for ribonuclease 3-aided processing of pre-crRNA. Subsequently, Cas9/crRNA/tracrRNA endonucleolytically cleaves linear or circular dsDNA target complementary to the spacer. The target strand not complementary to crRNA is first cut endonucleolytically, and then trimmed 3′-5′ exonucleolytically. In nature, DNA-binding and cleavage typically requires protein and both RNAs. However, single guide RNAs (“sgRNA”, or simply “gNRA”) can be engineered so as to incorporate aspects of both the crRNA and tracrRNA into a single RNA species. See, e.g., Jinek M., Chylinski K., Fonfara I., Hauer M., Doudna J. A., Charpentier E. Science 337:816-821(2012), the entire contents of which is hereby incorporated by reference. Cas9 recognizes a short motif in the CRISPR repeat sequences (the PAM or protospacer adjacent motif) to help distinguish self versus non-self. See e.g., “Complete genome sequence of an M1 strain of Streptococcus pyogenes.” Ferretti, J. J. et al., Natl. Acad. Sci. U.S.A. 98:4658-4663(2001); “CRISPR RNA maturation by trans-encoded small RNA and host factor RNase III.” Deltcheva E. et al., Nature 471:602-607(2011); and “Programmable dual-RNA-guided DNA endonuclease in adaptive bacterial immunity.” Jinek M. et al, Science 337:816-821(2012), the entire contents of each of which are incorporated herein by reference).

[0402] The PAM sequence can be any PAM sequence known in the art. Suitable PAM sequences include, but are not limited to, NGG, NGA, NGC, NGN, NGT, NGCG, NGAG, NGAN, NGNG, NGCN, NGCG, NGTN, NNGRRT, NNNRRT, NNGRR(N), TTTV, TYCV, TYCV, TATV, NNNNGATT, NNAGAAW, or NAAAAC. Y is a pyrimidine; N is any nucleotide base; W is A or T.

[0403] In an embodiment, a guide polynucleotide described herein can be RNA or DNA.

[0404] In one embodiment, the guide polynucleotide is a gRNA. An RNA/Cas complex can assist in “guiding” a Cas protein to a target DNA. Cas9/crRNA/tracrRNA endonucleolytically cleaves linear or circular dsDNA target complementary to the spacer.

[0405] The target strand not complementary to crRNA is first cut endonucleolytically, then trimmed 3′-5′ exonucleolytically. In nature, DNA-binding and cleavage typically requires protein and both RNAs. However, single guide RNAs (“sgRNA”, or simply “gNRA”) can be engineered so as to incorporate aspects of both the crRNA and tracrRNA into a single RNA species. See, e.g., Jinek M. et al., Science 337:816-821(2012), the entire contents of which is hereby incorporated by reference.

[0406] In some embodiments, the guide polynucleotide is at least one single guide RNA (“sgRNA” or “gNRA”). In some embodiments, a guide polynucleotide comprises two or more individual polynucleotides, which can interact with one another via, for example, complementary base pairing (e.g., a dual guide polynucleotide, dual gRNA). For example, a guide polynucleotide can comprise a CRISPR RNA (crRNA) and a trans-activating CRISPR RNA (tracrRNA) or can comprise one or more trans-activating CRISPR RNA (tracrRNA).

[0407] In some embodiments, the guide polynucleotide is at least one tracrRNA. In some embodiments, the guide polynucleotide does not require PAM sequence to guide the polynucleotide-programmable DNA-binding domain (e.g., Cas9 or Cpf1) to the target nucleotide sequence.

[0408] A guide polynucleotide may include natural or non-natural (or unnatural) nucleotides (e.g., peptide nucleic acid or nucleotide analogs). In some cases, the targeting region of a guide nucleic acid sequence can be at least 15, 16, 17, 18, 19, 20, 21, 22, 23, 24, 25, 26, 27, 28, 29, or 30 nucleotides in length. A targeting region of a guide nucleic acid can be between 10-30 nucleotides in length, or between 15-25 nucleotides in length, or between 15-20 nucleotides in length.

[0409] In some embodiments, the base editor provided herein utilizes one or more guide polynucleotide (e.g., multiple gRNA). In some embodiments, a single guide polynucleotide is utilized for different base editors described herein. For example, a single guide polynucleotide can be utilized for a cytidine base editor and an adenosine base editor.

[0410] In some embodiments, the methods described herein can utilize an engineered Cas protein. A guide RNA (gRNA) is a short synthetic RNA composed of a scaffold sequence necessary for Cas-binding and a user-defined ˜20 nucleotide spacer that defines the genomic target to be modified. Exemplary gRNA scaffold sequences are provided in the sequence listing as SEQ ID NOs: 90 and 243-252. Thus, a skilled artisan can change the genomic target of the Cas protein specificity is partially determined by how specific the gRNA targeting sequence is for the genomic target compared to the rest of the genome.

[0411] In other embodiments, a guide polynucleotide can comprise both the polynucleotide targeting portion of the nucleic acid and the scaffold portion of the nucleic acid in a single molecule (i.e., a single-molecule guide nucleic acid). For example, a single-molecule guide polynucleotide can be a single guide RNA (sgRNA or gRNA). Herein the term guide polynucleotide sequence contemplates any single, dual or multi-molecule nucleic acid capable of interacting with and directing a base editor to a target polynucleotide sequence.

[0412] Typically, a guide polynucleotide (e.g., crRNA/trRNA complex or a gRNA) comprises a “polynucleotide-targeting segment” that includes a sequence capable of recognizing and binding to a target polynucleotide sequence, and a “protein-binding segment” that stabilizes the guide polynucleotide within a polynucleotide programmable nucleotide binding domain component of a base editor. In some embodiments, the polynucleotide targeting segment of the guide polynucleotide recognizes and binds to a DNA polynucleotide, thereby facilitating the editing of a base in DNA. In other cases, the polynucleotide targeting segment of the guide polynucleotide recognizes and binds to an RNA polynucleotide, thereby facilitating the editing of a base in RNA. Herein a “segment” refers to a section or region of a molecule, e.g., a contiguous stretch of nucleotides in the guide polynucleotide. A segment can also refer to a region/section of a complex such that a segment can comprise regions of more than one molecule. For example, where a guide polynucleotide comprises multiple nucleic acid molecules, the protein-binding segment of can include all or a portion of multiple separate molecules that are for instance hybridized along a region of complementarity. In some embodiments, a protein-binding segment of a DNA-targeting RNA that comprises two separate molecules can comprise (i) base pairs 40-75 of a first RNA molecule that is 100 base pairs in length; and (ii) base pairs 10-25 of a second RNA molecule that is 50 base pairs in length. The definition of “segment,” unless otherwise specifically defined in a particular context, is not limited to a specific number of total base pairs, is not limited to any particular number of base pairs from a given RNA molecule, is not limited to a particular number of separate molecules within a complex, and can include regions of RNA molecules that are of any total length and can include regions with complementarity to other molecules.

[0413] The guide polynucleotides can be synthesized chemically, synthesized enzymatically, or a combination thereof. For example, the gRNA can be synthesized using standard phosphoramidite-based solid-phase synthesis methods. Alternatively, the gRNA can be synthesized in vitro by operably linking DNA encoding the gRNA to a promoter control sequence that is recognized by a phage RNA polymerase. Examples of suitable phage promoter sequences include T7, T3, SP6 promoter sequences, or variations thereof. In embodiments in which the gRNA comprises two separate molecules (e.g., crRNA and tracrRNA), the crRNA can be chemically synthesized and the tracrRNA can be enzymatically synthesized.

[0414] A gRNA molecule can be transcribed in vitro.

[0415] A guide polynucleotide may be expressed, for example, by a DNA that encodes the gRNA, e.g., a DNA vector comprising a sequence encoding the gRNA. The gRNA may be encoded alone or together with an encoded base editor. Such DNA sequences may be introduced into an expression system, e.g., a cell, together or separately. For example, DNA sequences encoding a polynucleotide programmable nucleotide binding domain and a gRNA may be introduced into a cell, each DNA sequence can be part of a separate molecule (e.g., one vector containing the polynucleotide programmable nucleotide binding domain coding sequence and a second vector containing the gRNA coding sequence) or both can be part of a same molecule (e.g., one vector containing coding (and regulatory) sequence for both the polynucleotide programmable nucleotide binding domain and the gRNA). An RNA can be transcribed from a synthetic DNA molecule, e.g., a gBlocks@ gene fragment.

[0416] A gRNA or a guide polynucleotide can comprise three regions: a first region at the 5′ end that can be complementary to a target site in a chromosomal sequence, a second internal region that can form a stem loop structure, and a third 3′ region that can be single-stranded. A first region of each gRNA can also be different such that each gRNA guides a fusion protein to a specific target site. Further, second and third regions of each gRNA can be identical in all gRNAs.

[0417] A first region of a gRNA or a guide polynucleotide can be complementary to sequence at a target site in a chromosomal sequence such that the first region of the gRNA can base pair with the target site. In some cases, a first region of a gRNA can comprise from or from about 10 nucleotides to 25 nucleotides (i.e., from 10 nucleotides to nucleotides; or from about 10 nucleotides to about 25 nucleotides; or from 10 nucleotides to about 25 nucleotides; or from about 10 nucleotides to 25 nucleotides) or more. For example, a region of base pairing between a first region of a gRNA and a target site in a chromosomal sequence can be or can be about 10, 11, 12, 13, 14, 15, 16, 17, 18, 19, 20, 22, 23, 24, 25, or more nucleotides in length. Sometimes, a first region of a gRNA can be or can be about 19, 20, or 21 nucleotides in length.

[0418] A gRNA or a guide polynucleotide can also comprise a second region that forms a secondary structure. For example, a secondary structure formed by a gRNA can comprise a stem (or hairpin) and a loop. A length of a loop and a stem can vary. For example, a loop can range from or from about 3 to 10 nucleotides in length, and a stem can range from or from about 6 to 20 base pairs in length. A stem can comprise one or more bulges of 1 to 10 or about 10 nucleotides. The overall length of a second region can range from or from about 16 to 60 nucleotides in length. For example, a loop can be or can be about 4 nucleotides in length and a stem can be or can be about 12 base pairs.

[0419] A gRNA or a guide polynucleotide can also comprise a third region at the 3′ end that can be essentially single-stranded. For example, a third region is sometimes not complementarity to any chromosomal sequence in a cell of interest and is sometimes not complementarity to the rest of a gRNA. Further, the length of a third region can vary. A third region can be more than or more than about 4 nucleotides in length. For example, the length of a third region can range from or from about 5 to 60 nucleotides in length.

[0420] A gRNA or a guide polynucleotide can target any exon or intron of a gene target.

[0421] In some cases, a guide can target exon 1 or 2 of a gene, in other cases; a guide can target exon 3 or 4 of a gene. In some embodiments, a composition comprises multiple gRNAs that all target the same exon or multiple gRNAs that target different exons. An exon and/or an intron of a gene can be targeted.

[0422] A gRNA or a guide polynucleotide can target a nucleic acid sequence of about 20 nucleotides or less than about 20 nucleotides (e.g., at least about 5, 10, 15, 16, 17, 18, 19, 20, 21, 22, 23, 24, 25, 30 nucleotides), or anywhere between about 1-100 nucleotides (e.g., 5, 10, 15, 16, 17, 18, 19, 20, 21, 22, 23, 24, 25, 30, 40, 50, 60, 70, 80, 90, 100). A target nucleic acid sequence can be or can be about 20 bases immediately 5′ of the first nucleotide of the PAM. A gRNA can target a nucleic acid sequence. A target nucleic acid can be at least or at least about 1-10, 1-20, 1-30, 1-40, 1-50, 1-60, 1-70, 1-80, 1-90, or 1-100 nucleotides.

[0423] Methods for selecting, designing, and validating guide polynucleotides, e.g., gRNAs and targeting sequences are described herein and known to those skilled in the art. For example, to minimize the impact of potential substrate promiscuity of a deaminase domain in the nucleobase editor system (e.g., an AID domain), the number of residues that could unintentionally be targeted for deamination (e.g., off-target C residues that could potentially reside on single strand DNA within the target nucleic acid locus) may be minimized. In addition, software tools can be used to optimize the gRNAs corresponding to a target nucleic acid sequence, e.g., to minimize total off-target activity across the genome. For example, for each possible targeting domain choice using S. pyogenes Cas9, all off-target sequences (preceding selected PAMs, e.g., NAG or NGG) may be identified across the genome that contain up to certain number (e.g., 1, 2, 3, 4, 5, 6, 7, 8, 9, or 10) of mismatched base-pairs. First regions of gRNAs complementary to a target site can be identified, and all first regions (e.g., crRNAs) can be ranked according to its total predicted off-target score; the top-ranked targeting domains represent those that are likely to have the greatest on-target and the least off-target activity. Candidate targeting gRNAs can be functionally evaluated by using methods known in the art and/or as set forth herein.

[0424] As a non-limiting example, target DNA hybridizing sequences in crRNAs of a gRNA for use with Cas9s may be identified using a DNA sequence searching algorithm. gRNA design is carried out using custom gRNA design software based on the public tool Cas-OFFinder as described in Bae S., Park J., & Kim J.-S. Cas-OFFinder: A fast and versatile algorithm that searches for potential off-target sites of Cas9 RNA-guided endonucleases. Bioinformatics 30, 1473-1475 (2014). This software scores guides after calculating their genome-wide off-target propensity. Typically matches ranging from perfect matches to 7 mismatches are considered for guides ranging in length from 17 to 24. Once the off-target sites are computationally-determined, an aggregate score is calculated for each guide and summarized in a tabular output using a web-interface. In addition to identifying potential target sites adjacent to PAM sequences, the software also identifies all PAM adjacent sequences that differ by 1, 2, 3 or more than 3 nucleotides from the selected target sites. Genomic DNA sequences for a target nucleic acid sequence, e.g., a target gene may be obtained and repeat elements may be screened using publicly available tools, for example, the RepeatMasker program. RepeatMasker searches input DNA sequences for repeated elements and regions of low complexity. The output is a detailed annotation of the repeats present in a given query sequence.

[0425] Following identification, first regions of gRNAs, e.g., crRNAs, are ranked into tiers based on their distance to the target site, their orthogonality and presence of 5′ nucleotides for close matches with relevant PAM sequences (for example, a 5′ G based on identification of close matches in the human genome containing a relevant PAM e.g., NGG PAM for S. pyogenes, NNGRRT or NNGRRV PAM for S. aureus). As used herein, orthogonality refers to the number of sequences in the human genome that contain a minimum number of mismatches to the target sequence. A “high level of orthogonality” or “good orthogonality” may, for example, refer to 20-mer targeting domains that have no identical sequences in the human genome besides the intended target, nor any sequences that contain one or two mismatches in the target sequence. Targeting domains with good orthogonality may be selected to minimize off-target DNA cleavage.

[0426] A gRNA can then be introduced into a cell or embryo as an RNA molecule or a non-RNA nucleic acid molecule, e.g., DNA molecule. In one embodiment, a DNA encoding a gRNA is operably linked to promoter control sequence for expression of the gRNA in a cell or embryo of interest. A RNA coding sequence can be operably linked to a promoter sequence that is recognized by RNA polymerase III (Pol III). Plasmid vectors that can be used to express gRNA include, but are not limited to, px330 vectors and px333 vectors. In some cases, a plasmid vector (e.g., px333 vector) can comprise at least two gRNA-encoding DNA sequences. Further, a vector can comprise additional expression control sequences (e.g., enhancer sequences, Kozak sequences, polyadenylation sequences, transcriptional termination sequences, etc.), selectable marker sequences (e.g., GFP or antibiotic resistance genes such as puromycin), origins of replication, and the like. A DNA molecule encoding a gRNA can also be linear. A DNA molecule encoding a gRNA or a guide polynucleotide can also be circular.

[0427] In some embodiments, a reporter system is used for detecting base-editing activity and testing candidate guide polynucleotides. In some embodiments, a reporter system comprises a reporter gene based assay where base editing activity leads to expression of the reporter gene. For example, a reporter system may include a reporter gene comprising a deactivated start codon, e.g., a mutation on the template strand from 3′-TAC-5′ to 3′-CAC-5′. Upon successful deamination of the target C, the corresponding mRNA will be transcribed as 5′-AUG-3′ instead of 5′-GUG-3′, enabling the translation of the reporter gene. Suitable reporter genes will be apparent to those of skill in the art. Non-limiting examples of reporter genes include gene encoding green fluorescence protein (GFP), red fluorescence protein (RFP), luciferase, secreted alkaline phosphatase (SEAP), or any other gene whose expression are detectable and apparent to those skilled in the art. The reporter system can be used to test many different gRNAs, e.g., in order to determine which residue(s) with respect to the target DNA sequence the respective deaminase will target. sgRNAs that target non-template strand can also be tested in order to assess off-target effects of a specific base editing protein, e.g., a Cas9 deaminase fusion protein. In some embodiments, such gRNAs can be designed such that the mutated start codon will not be base-paired with the gRNA. The guide polynucleotides can comprise standard ribonucleotides, modified ribonucleotides (e.g., pseudouridine), ribonucleotide isomers, and/or ribonucleotide analogs. In some embodiments, the guide polynucleotide can comprise at least one detectable label. The detectable label can be a fluorophore (e.g., FAM, TMR, Cy3, Cy5, Texas Red, Oregon Green, Alexa Fluors, Halo tags, or suitable fluorescent dye), a detection tag (e.g., biotin, digoxigenin, and the like), quantum dots, or gold particles.

[0428] In some embodiments, a base editor system may comprise multiple guide polynucleotides, e.g., gRNAs. For example, the gRNAs may target to one or more target loci (e.g., at least 1 gRNA, at least 2 gRNA, at least 5 gRNA, at least 10 gRNA, at least gRNA, at least 30 g RNA, at least 50 gRNA) comprised in a base editor system. The multiple gRNA sequences can be tandemly arranged and are preferably separated by a direct repeat.

[0429] A guide polynucleotide can comprise one or more modifications to provide a nucleic acid with a new or enhanced feature. A guide polynucleotide can comprise a nucleic acid affinity tag. A guide polynucleotide can comprise synthetic nucleotide, synthetic nucleotide analog, nucleotide derivatives, and/or modified nucleotides.

[0430] In some cases, a gRNA or a guide polynucleotide can comprise modifications. A modification can be made at any location of a gRNA or a guide polynucleotide. More than one modification can be made to a single gRNA or a guide polynucleotide. A gRNA or a guide polynucleotide can undergo quality control after a modification. In some cases, quality control can include PAGE, HPLC, MS, or any combination thereof.

[0431] A modification of a gRNA or a guide polynucleotide can be a substitution, insertion, deletion, chemical modification, physical modification, stabilization, purification, or any combination thereof.

[0432] A gRNA or a guide polynucleotide can also be modified by 5′adenylate, 5′ guanosine-triphosphate cap, 5′N7-Methylguanosine-triphosphate cap, 5′triphosphate cap, 3′ phosphate, 3′ thiophosphate, 5′ phosphate, 5′ thiophosphate, Cis-Syn thymidine dimer, trimers, C12 spacer, C3 spacer, C6 spacer, dSpacer, PC spacer, rSpacer, Spacer 18, Spacer 9, 3′-3′ modifications, 5′-5′ modifications, abasic, acridine, azobenzene, biotin, biotin BB, biotin TEG, cholesteryl TEG, desthiobiotin TEG, DNP TEG, DNP-X, DOTA, dT-Biotin, dual biotin, PC biotin, psoralen C2, psoralen C6, TINA, 3′ DABCYL, black hole quencher 1, black hole quencer 2, DABCYL SE, dT-DABCYL, IRDye QC-1, QSY-21, QSY-35, QSY-7, QSY-9, carboxyl linker, thiol linkers, 2′-deoxyribonucleoside analog purine, 2′-deoxyribonucleoside analog pyrimidine, ribonucleoside analog, 2′-O-methyl ribonucleoside analog, sugar modified analogs, wobble/universal bases, fluorescent dye label, 2′-fluoro RNA, 2′-O-methyl RNA, methylphosphonate, phosphodiester DNA, phosphodiester RNA, phosphothioate DNA, phosphorothioate RNA, UNA, pseudouridine-5′-triphosphate, 5′-methylcytidine-5′-triphosphate, or any combination thereof.

[0433] In some cases, a modification is permanent. In other cases, a modification is transient. In some cases, multiple modifications are made to a gRNA or a guide polynucleotide. A gRNA or a guide polynucleotide modification can alter physiochemical properties of a nucleotide, such as their conformation, polarity, hydrophobicity, chemical reactivity, base-pairing interactions, or any combination thereof.

[0434] A guide polynucleotide can be transferred into a cell by transfecting the cell with an isolated gRNA or a plasmid DNA comprising a sequence coding for the guide RNA and a promoter. A gRNAor a guide polynucleotide can also be transferred into a cell in other way, such as using virus-mediated gene delivery. A gRNAor a guide polynucleotide can be isolated. For example, a gRNA can be transfected in the form of an isolated RNA into a cell or organism. A gRNA can be prepared by in vitro transcription using any in vitro transcription system known in the art. A gRNAcan be transferred to a cell in the form of isolated RNA rather than in the form of plasmid comprising encoding sequence for a gRNA.

[0435] A modification can also be a phosphorothioate substitute. In some cases, a natural phosphodiester bond can be susceptible to rapid degradation by cellular nucleases and; a modification of internucleotide linkage using phosphorothioate (PS) bond substitutes can be more stable towards hydrolysis by cellular degradation. A modification can increase stability in a gRNA or a guide polynucleotide. A modification can also enhance biological activity. In some cases, a phosphorothioate enhanced RNA gRNA can inhibit RNase A, RNase T1, calf serum nucleases, or any combinations thereof. These properties can allow the use of PS-RNA gRNAs to be used in applications where exposure to nucleases is of high probability in vivo or in vitro. For example, phosphorothioate (PS) bonds can be introduced between the last 3-5 nucleotides at the 5′- or ″-end of a gRNA which can inhibit exonuclease degradation. In some cases, phosphorothioate bonds can be added throughout an entire gRNA to reduce attack by endonucleases.

[0436] In some embodiments, the guide RNA is designed to disrupt a splice site (i.e., a splice acceptor (SA) or a splice donor (SD). In some embodiments, the guide RNA is designed such that the base editing results in a premature STOP codon.

### Protospacer Adjacent Motif

[0437] The term “protospacer adjacent motif (PAM)” or PAM-like motif refers to a 2-6 base pair DNA sequence immediately following the DNA sequence targeted by the Cas9 nuclease in the CRISPR bacterial adaptive immune system. In some embodiments, the PAM can be a 5′ PAM (i.e., located upstream of the 5′ end of the protospacer). In other embodiments, the PAM can be a 3′ PAM (i.e., located downstream of the 5′ end of the protospacer). The PAM sequence is essential for target binding, but the exact sequence depends on a type of Cas protein. The PAM sequence can be any PAM sequence known in the art. Suitable PAM sequences include, but are not limited to, NGG, NGA, NGC, NGN, NGT, NGTT, NGCG, NGAG, NGAN, NGNG, NGCN, NGCG, NGTN, NNGRRT, NNNRRT, NNGRR(N), TTTV, TYCV, TYCV, TATV, NNNNGATT, NNAGAAW, or NAAAAC. Y is a pyrimidine; N is any nucleotide base; W is A or T.

[0438] A base editor provided herein can comprise a CRISPR protein-derived domain that is capable of binding a nucleotide sequence that contains a canonical or non-canonical protospacer adjacent motif (PAM) sequence. A PAM site is a nucleotide sequence in proximity to a target polynucleotide sequence. Some aspects of the disclosure provide for base editors comprising all or a portion of CRISPR proteins that have different PAM specificities.

[0439] For example, typically Cas9 proteins, such as Cas9 from S. pyogenes (spCas9), require a canonical NGG PAM sequence to bind a particular nucleic acid region, where the “N” in “NGG” is adenine (A), thymine (T), guanine (G), or cytosine (C), and the G is guanine. A PAM can be CRISPR protein-specific and can be different between different base editors comprising different CRISPR protein-derived domains. A PAM can be 5′ or 3′ of a target sequence. A PAM can be upstream or downstream of a target sequence. A PAM can be 1, 2, 3, 4, 5, 6, 7, 8, 9, 10 or more nucleotides in length. Often, a PAM is between 2-6 nucleotides in length.

[0440] In some embodiments, the PAM is an “NRN” PAM where the “N” in “NR” is adenine (A), thymine (T), guanine (G), or cytosine (C), and the R is adenine (A) or guanine (G); or the PAM is an “NYN” PAM, wherein the “N” in NYN is adenine (A), thymine (T), guanine (G), or cytosine (C), and the Y is cytidine (C) or thymine (T), for example, as described in R. T. Walton et al., 2020, Science, 10.1126/science.aba8853 (2020), the entire contents of which are incorporated herein by reference.

[0441] Several PAM variants are described in Table 7 below.

TABLE 7
Cas9 proteins and corresponding PAM sequences

| Variant | PAM |
|---|---|
| spCas9 | NGG |
| spCas9-VRQR | NGA |
| spCas9-VRER | NGCG |
| xCas9 (sp) | NGN |
| saCas9 | NNGRRT |
| saCas9-KKH | NNNRRT |
| spCas9-MQKSER | NGCG |
| spCas9-MQKSER | NGCN |
| spCas9-LRKIQK | NGTN |
| spCas9-LRVSQK | NGTN |
| spCas9-LRVSQL | NGTN |
| spCas9-MQKFRAER | NGC |
| Cpf1 | 5′ (TTTV) |
| SpyMac | 5′-NAA-3′ |

[0442] In some embodiments, the PAM is NGC. In some embodiments, the NGC PAM is recognized by a Cas9 variant. In some embodiments, the NGC PAM variant includes one or more amino acid substitutions selected from D1135M, S1136Q, G1218K, E1219F, A1322R, D1332A, R1335E, and T1337R (collectively termed “MQKFRAER”).

[0443] In some embodiments, the PAM is NGT. In some embodiments, the NGT PAM is recognized by a Cas9 variant. In some embodiments, the NGT PAM variant is generated through targeted mutations at one or more residues 1335, 1337, 1135, 1136, 1218, and/or 1219. In some embodiments, the NGT PAM variant is created through targeted mutations at one or more residues 1219, 1335, 1337, 1218. In some embodiments, the NGT PAM variant is created through targeted mutations at one or more residues 1135, 1136, 1218, 1219, and 1335. In some embodiments, the NGT PAM variant is selected from the set of targeted mutations provided in Tables 8A and 8B below.

TABLE 8A
NGT PAM Variant Mutations at
residues 1219 ,1335, 1337, 1218

| Variant | E1219V | R1335Q | T1337 | G1218 |
|---|---|---|---|---|
| 1 | F | V | T | |
| 2 | F | V | R | |
| 3 | F | V | Q | |
| 4 | F | V | L | |
| 5 | F | V | T | R |
| 6 | F | V | R | R |
| 7 | F | V | Q | R |
| 8 | F | V | L | R |
| 9 | L | L | T | |
| 10 | L | L | R | |
| 11 | L | L | Q | |
| 12 | L | L | L | |
| 13 | F | I | T | |
| 14 | F | I | R | |
| 15 | F | I | 0 | |
| 16 | F | I | L | |
| 17 | F | G | C | |
| 18 | H | L | N | |
| 19 | F | G | C | A |
| 20 | H | L | N | V |
| 21 | L | A | W | |
| 22 | L | A | F | |
| 23 | L | A | Y | |
| 24 | I | A | W | |
| 25 | I | A | F | |
| 26 | I | A | Y | |

TABLE 8B
NGT PAM Variant Mutations at residues
1135, 1136, 1218, 1219, and 1335

| Variant | D1135L | S1136R | G1218S | E1219V | R1335Q |
|---|---|---|---|---|---|
| 27 | G | | | | |
| 28 | V | | | | |
| 29 | I | | | | |
| 30 | | A | | | |
| 31 | | W | | | |
| 32 | | H | | | |
| 33 | | K | | | |
| 34 | | | K | | |
| 35 | | | R | | |
| 36 | | | Q | | |
| 37 | | | T | | |
| 38 | | | N | | |
| 39 | | | | I | |
| 40 | | | | A | |
| 41 | | | | N | |
| 42 | | | | Q | |
| 43 | | | | G | |
| 44 | | | | L | |
| 45 | | | | S | |
| 46 | | | | T | |
| 47 | | | | | L |
| 48 | | | | | I |
| 49 | | | | | V |
| 50 | | | | | N |
| 51 | | | | | S |
| 52 | | | | | T |
| 53 | | | | | F |
| 54 | | | | | Y |
| 55 | N12860 | I1331F | | | |

[0444] In some embodiments, the NGT PAM variant is selected from variant 5, 7, 28, 31, or 36 in Table 8A and Table 8B. In some embodiments, the variants have improved NGT PAM recognition.

[0445] In some embodiments, the NGT PAM variants have mutations at residues 1219, 1335, 1337, and/or 1218. In some embodiments, the NGT PAM variant is selected with mutations for improved recognition from the variants provided in Table 9 below.

TABLE 9
NGT PAM Variant Mutations at residues
1219, 1335, 1337, and 1218

| Variant | E1219V | R1335Q | T1337 | G1218 |
|---|---|---|---|---|
| 1 | F | V | T | |
| 2 | F | V | R | |
| 3 | F | V | Q | |
| 4 | F | V | L | |
| 5 | F | V | T | R |
| 6 | F | V | R | R |
| 7 | F | V | Q | R |
| 8 | F | V | L | R |

[0446] In some embodiments, the NGT PAM is selected from the variants provided in Table 10 below.

TABLE 10
NGT PAM variants

| | NGTN | | | | | | | |
|---|---|---|---|---|---|---|---|---|
| | variant | D1135 | S1136 | G1218 | E1219 | A1322R | R1335 | T1337 |
| Variant | LRKIQK | L | R | K | I | — | Q | K |
| 1 | | | | | | | | |
| Variant | LRSVQK | L | R | S | V | — | Q | K |
| 2 | | | | | | | | |
| Variant | LRSVQL | L | R | S | V | — | Q | L |
| 3 | | | | | | | | |
| Variant | LRKIRQK | L | R | K | I | R | Q | K |
| 4 | | | | | | | | |
| Variant | LRSVRQK | L | R | S | V | R | Q | K |
| 5 | | | | | | | | |
| Variant | LRSVRQL | L | R | S | V | R | Q | L |
| 6 | | | | | | | | |

[0447] In some embodiments the NGTN variant is variant 1. In some embodiments, the NGTN variant is variant 2. In some embodiments, the NGTN variant is variant 3. In some embodiments, the NGTN variant is variant 4. In some embodiments, the NGTN variant is variant 5. In some embodiments, the NGTN variant is variant 6.

[0448] In some embodiments, the Cas9 domain is a Cas9 domain from Streptococcus pyogenes (SpCas9). In some embodiments, the SpCas9 domain is a nuclease active SpCas9, a nuclease inactive SpCas9 (SpCas9d), or a SpCas9 nickase (SpCas9n). In some embodiments, the SpCas9 comprises a D9X mutation, or a corresponding mutation in any of the amino acid sequences provided herein, wherein X is any amino acid except for D. In some embodiments, the SpCas9 comprises a 1D9A mutation, or a corresponding mutation in any of the amino acid sequences provided herein. In some embodiments, the SpCas9 domain, the SpCas9d domain, or the SpCas9n domain can bind to a nucleic acid sequence having a non-canonical PAM. In some embodiments, the SpCas9 domain, the SpCas9d domain, or the SpCas9n domain can bind to a nucleic acid sequence having an NGG, a NGA, or a NGCG PAM sequence.

[0449] In some embodiments, the SpCas9 domain comprises one or more of a D1135X, a R1335X, and a T1337X mutation, or a corresponding mutation in any of the amino acid sequences provided herein, wherein X is any amino acid. In some embodiments, the SpCas9 domain comprises one or more of a D1135E, R1335Q, and T1337R mutation, or a corresponding mutation in any of the amino acid sequences provided herein. In some embodiments, the SpCas9 domain comprises a D1135E, a R1335Q, and a T1337R mutation, or corresponding mutations in any of the amino acid sequences provided herein. In some embodiments, the SpCas9 domain comprises one or more of a D1135X, a R1335X, and a T1337X mutation, or a corresponding mutation in any of the amino acid sequences provided herein, wherein X is any amino acid. In some embodiments, the SpCas9 domain comprises one or more of a D1135V, a R1335Q, and a T1337R mutation, or a corresponding mutation in any of the amino acid sequences provided herein. In some embodiments, the SpCas9 domain comprises a D1135V, a R1335Q, and a T1337R mutation, or corresponding mutations in any of the amino acid sequences provided herein. In some embodiments, the SpCas9 domain comprises one or more of a D1135X, a G1218X, a R1335X, and a T1337X mutation, or a corresponding mutation in any of the amino acid sequences provided herein, wherein X is any amino acid. In some embodiments, the SpCas9 domain comprises one or more of a D1135V, a G1218R, a R1335Q, and a T1337R mutation, or a corresponding mutation in any of the amino acid sequences provided herein. In some embodiments, the SpCas9 domain comprises a D1135V, a G1218R, a R1335Q, and a T1337R mutation, or corresponding mutations in any of the amino acid sequences provided herein.

[0450] In some examples, a PAM recognized by a CRISPR protein-derived domain of a base editor disclosed herein can be provided to a cell on a separate oligonucleotide to an insert (e.g., an AAV insert) encoding the base editor. In such embodiments, providing PAM on a separate oligonucleotide can allow cleavage of a target sequence that otherwise would not be able to be cleaved, because no adjacent PAM is present on the same polynucleotide as the target sequence.

[0451] In an embodiment, S. pyogenes Cas9 (SpCas9) can be used as a CRISPR endonuclease for genome engineering. However, others can be used. In some embodiments, a different endonuclease can be used to target certain genomic targets. In some embodiments, synthetic SpCas9-derived variants with non-NGG PAM sequences can be used. Additionally, other Cas9 orthologues from various species have been identified and these “non-SpCas9s” can bind a variety of PAM sequences that can also be useful for the present disclosure. For example, the relatively large size of SpCas9 (approximately 4kb coding sequence) can lead to plasmids carrying the SpCas9 cDNA that cannot be efficiently expressed in a cell. Conversely, the coding sequence for Staphylococcus aureus Cas9 (SaCas9) is approximately 1 kilobase shorter than SpCas9, possibly allowing it to be efficiently expressed in a cell. Similar to SpCas9, the SaCas9 endonuclease is capable of modifying target genes in mammalian cells in vitro and in mice in vivo. In some embodiments, a Cas protein can target a different PAM sequence. In some embodiments, a target gene can be adjacent to a Cas9 PAM, 5′-NGG, for example. In other embodiments, other Cas9 orthologs can have different PAM requirements. For example, other PAMs such as those of S. thermophilus (5′-NNAGAA for CRISPR1 and 5′-NGGNG for CRISPR3) and Neisseria meningitidis (5′-NNNNGATT) can also be found adjacent to a target gene.

[0452] In some embodiments, for a S. pyogenes system, a target gene sequence can precede (i.e., be 5′ to) a 5′-NGG PAM, and a 20-nt guide RNA sequence can base pair with an opposite strand to mediate a Cas9 cleavage adjacent to a PAM. In some embodiments, an adjacent cut can be or can be about 3 base pairs upstream of a PAM. In some embodiments, an adjacent cut can be or can be about 10 base pairs upstream of a PAM. In some embodiments, an adjacent cut can be or can be about 0-20 base pairs upstream of a PAM. For example, an adjacent cut can be next to, 1, 2, 3, 4, 5, 6, 7, 8, 9, 10, 11, 12, 13, 14, 15, 16, 17, 18, 19, 20, 21, 22, 23, 24, 25, 26, 27, 28, 29, or 30 base pairs upstream of a PAM. An adjacent cut can also be downstream of a PAM by 1 to 30 base pairs. The sequences of exemplary SpCas9 proteins capable of binding a PAM sequence follow:

[0453] In some embodiments, engineered SpCas9 variants are capable of recognizing protospacer adjacent motif (PAM) sequences flanked by a 3′ H (non-G PAM) (see Tables 2A-2B and 3). In some embodiments, the SpCas9 variants recognize NRNH PAMs (where R is A or G and H is A, C or T). In some embodiments, the non-G PAM is NRRH, NRTH, or NRCH (see e.g., Miller, S. M., et al. Continuous evolution of SpCas9 variants compatible with non-G PAMs, Nat. Biotechnol. (2020), the contents of which is incorporated herein by reference in its entirety).

[0454] In some embodiments, the Cas9 domain is a recombinant Cas9 domain. In some embodiments, the recombinant Cas9 domain is a SpyMacCas9 domain. In some embodiments, the SpyMacCas9 domain is a nuclease active SpyMacCas9, a nuclease inactive SpyMacCas9 (SpyMacCas9d), or a SpyMacCas9 nickase (SpyMacCas9n). In some embodiments, the SaCas9 domain, the SaCas9d domain, or the SaCas9n domain can bind to a nucleic acid sequence having a non-canonical PAM. In some embodiments, the SpyMacCas9 domain, the SpCas9d domain, or the SpCas9n domain can bind to a nucleic acid sequence having a NAA PAM sequence.

[0455] The sequence of an exemplary Cas9 A homolog of Spy Cas9 in Streptococcus macacae with native 5′-NAAN-3′ PAM specificity is known in the art and described, for example, by Jakimo et al., (www.biorxiv.org/content/biorxiv/early/2018/09/27/429654.full.pdf), and is provided as SEQ ID NO: 162.

[0456] In some embodiments, a variant Cas9 protein harbors, H840A, P475A, W476A, N477A, D1125A, W1126A, and D1218A mutations such that the polypeptide has a reduced ability to cleave a target DNA or RNA. Such a Cas9 protein has a reduced ability to cleave a target DNA (e.g., a single stranded target DNA) but retains the ability to bind a target DNA (e.g., a single stranded target DNA). As another non-limiting example, in some embodiments, the variant Cas9 protein harbors D10A, H840A, P475A, W476A, N477A, D1125A, W1126A, and D1218A mutations such that the polypeptide has a reduced ability to cleave a target DNA. Such a Cas9 protein has a reduced ability to cleave a target DNA (e.g., a single stranded target DNA) but retains the ability to bind a target DNA (e.g., a single stranded target DNA). In some embodiments, when a variant Cas9 protein harbors W476A and W1126A mutations or when the variant Cas9 protein harbors P475A, W476A, N477A, D1125A, W1126A, and D1218A mutations, the variant Cas9 protein does not bind efficiently to a PAM sequence. Thus, in some such cases, when such a variant Cas9 protein is used in a method of binding, the method does not require a PAM sequence. In other words, in some embodiments, when such a variant Cas9 protein is used in a method of binding, the method can include a guide RNA, but the method can be performed in the absence of a PAM sequence (and the specificity of binding is therefore provided by the targeting segment of the guide RNA). Other residues can be mutated to achieve the above effects (i.e., inactivate one or the other nuclease portions). As non-limiting examples, residues D10, G12, G17, E762, H840, N854, N863, H982, H983, A984, D986, and/or A987 can be altered (i.e., substituted). Also, mutations other than alanine substitutions are suitable.

[0457] In some embodiments, a CRISPR protein-derived domain of a base editor can comprise all or a portion of a Cas9 protein with a canonical PAM sequence (NGG). In other embodiments, a Cas9-derived domain of a base editor can employ a non-canonical PAM sequence. Such sequences have been described in the art and would be apparent to the skilled artisan. For example, Cas9 domains that bind non-canonical PAM sequences have been described in Kleinstiver, B. P., et al., “Engineered CRISPR-Cas9 nucleases with altered PAM specificities” Nature 523, 481-485 (2015); and Kleinstiver, B. P., et al., “Broadening the targeting range of Staphylococcus aureus CRISPR-Cas9 by modifying PAM recognition” Nature Biotechnology 33, 1293-1298 (2015); R. T. Walton et al. “Unconstrained genome targeting with near-PAMless engineered CRISPR-Cas9 variants” Science 10.1126/science.aba8853 (2020); Hu et al. “Evolved Cas9 variants with broad PAM compatibility and high DNA specificity,” Nature, 2018 Apr. 5, 556(7699), 57-63; Miller et al., “Continuous evolution of SpCas9 variants compatible with non-G PAMs” Nat. Biotechnol., 2020 April; 38(4):471-481; the entire contents of each are hereby incorporated by reference.

Fusion Proteins Comprising a NapDNAbp and a Cytidine Deaminase and/or Adenosine Deaminase

[0458] Some aspects of the disclosure provide fusion proteins comprising a Cas9 domain or other nucleic acid programmable DNA binding protein (e.g., Cas12) and one or more cytidine deaminase or adenosine deaminase domains. It should be appreciated that the Cas9 domain may be any of the Cas9 domains or Cas9 proteins (e.g., dCas9 or nCas9) provided herein. In some embodiments, any of the Cas9 domains or Cas9 proteins (e.g., dCas9 or nCas9) provided herein may be fused with any of the cytidine deaminases and/or adenosine deaminases provided herein. The domains of the base editors disclosed herein can be arranged in any order.

[0459] In some embodiments, the fusion protein comprises the following domains A-C, A-D, or A-E:

[0460] NH₂-[A-B-C]-COOH;

[0461] NH₂-[A-B-C-D]-COOH; or

[0462] NH₂-[A-B-C-D-E]-COOH;

wherein A and C or A, C, and E, each comprises one or more of the following:

[0463] an adenosine deaminase domain or an active fragment thereof,

[0464] a cytidine deaminase domain or an active fragment thereof, and

[0465] wherein B or B and D, each comprises one or more domains having nucleic acid sequence specific binding activity.

[0466] In some embodiments, the fusion protein comprises the following structure:

[0467] NH₂-[Aₙ-Bₒ-Cₙ]-COOH;

[0468] NH₂-[Aₙ-Bₒ-Cₙ-Dₒ]-COOH; or

[0469] NH₂-[Aₙ-Bₒ-Cₚ-Dₒ-E_{q}]-COOH;

wherein A and C or A, C, and E, each comprises one or more of the following:

[0470] an adenosine deaminase domain or an active fragment thereof,

[0471] a cytidine deaminase domain or an active fragment thereof, and

wherein n is an integer: 1, 2, 3, 4, or 5, wherein p is an integer: 0, 1, 2, 3, 4, or 5; wherein q is an integer 0, 1, 2, 3, 4, or 5; and wherein B or B and D each comprises a domain having nucleic acid sequence specific binding activity; and wherein o is an integer: 1, 2, 3, 4, or 5.

[0472] For example, and without limitation, in some embodiments, the fusion protein comprises the structure:

NH2-[adenosine deaminase]-[Cas9 domain]-COOH;
NH2-[Cas9 domain]-[adenosine deaminase]-COOH;
NH2-[cytidine deaminase]-[Cas9 domain]-COOH;
NH2-[Cas9 domain]-[cytidine deaminase]-COOH;
NH2-[cytidine deaminase]-[Cas9 domain]-[adenosine deaminase]-COOH;
NH2-[adenosine deaminase]-[Cas9 domain]-[cytidine deaminase]-COOH;
NH2-[adenosine deaminase]-[cytidine deaminase]-[Cas9 domain]-COOH;
NH2-[cytidine deaminase]-[adenosine deaminase]-[Cas9 domain]-COOH;
NH2-[Cas9 domain]-[adenosine deaminase]-[cytidine deaminase]-COOH; or
NH2-[Cas9 domain]-[cytidine deaminase]-[adenosine deaminase]-COOH.

[0473] In some embodiments, any of the Cas12 domains or Cas12 proteins provided herein may be fused with any of the cytidine or adenosine deaminases provided herein. For example, and without limitation, in some embodiments, the fusion protein comprises the structure:

NH2-[adenosine deaminase]-[Cas12 domain]-COOH,
NH2-[Cas12 domain]-[adenosine deaminase]-COOH;
NH2-[cytidine deaminase]-[Cas12 domain]-COOH;
NH2-[Cas12 domain]-[cytidine deaminase]-COOH;
NH2-[cytidine deaminase]-[Cas12 domain]-[adenosine deaminase]-COOH;
NH2-[adenosine deaminase]-[Cas12 domain]-[cytidine deaminase]-COOH;
NH2-[adenosine deaminase]-[cytidine deaminase]-[Cas12 domain]-COOH;
NH2-[cytidine deaminase]-[adenosine deaminase]-[Cas12 domain]-COOH;
NH2-[Cas12 domain]-[adenosine deaminase]-[cytidine deaminase]-COOH; or
NH2-[Cas12 domain]-[cytidine deaminase]-[adenosine deaminase]-COOH.

[0474] In some embodiments, the adenosine deaminase is a TadA*8. Exemplary fusion protein structures include the following:

NH2-[TadA*8]-[Cas9 domain]-COOH;
NH2-[Cas9 domain]-[TadA*8]-COOH;
NH2-[TadA*8]-[Cas12 domain]-COOH; or
NH2-[Cas12 domain]-[TadA*8]-COOH.

[0475] In some embodiments, the adenosine deaminase of the fusion protein comprises a TadA*8 and a cytidine deaminase and/or an adenosine deaminase. In some embodiments, the TadA*8 is TadA*8.1, TadA*8.2, TadA*8.3, TadA*8.4, TadA*8.5, TadA*8.6, TadA*8.7, TadA*8.8, TadA*8.9, TadA*8.10, TadA*8.11, TadA*8.12, TadA*8.13, TadA*8.14, TadA*8.15, TadA*8.16, TadA*8.17, TadA*8.18, TadA*8.19, TadA*8.20, TadA*8.21, TadA*8.22, TadA*8.23, or TadA*8.24.

[0476] Exemplary fusion protein structures include the following:

NH2-[TadA*8]-[Cas9/Cas12]-[adenosine deaminase]-COOH;
NH2-[adenosine deaminase]-[Cas9/Cas12]-[TadA*8]-COOH;
NH2-[TadA*8]-[Cas9/Cas12]-[cytidine deaminase]-COOH; or
NH2-[cytidine deaminase]-[Cas9/Cas12]-[TadA*8]-COOH.

[0477] In some embodiments, the adenosine deaminase of the fusion protein comprises a TadA*9 and a cytidine deaminase and/or an adenosine deaminase. Exemplary fusion protein structures include the following:

NH2-[TadA*9]-[Cas9/Cas12]-[adenosine deaminase]-COOH;
NH2-[adenosine deaminase]-[Cas9/Cas12]-[TadA*9]-COOH;
NH2-[TadA*9]-[Cas9/Cas12]-[cytidine deaminase]-COOH; or
NH2-[cytidine deaminase]-[Cas9/Cas12]-[TadA*9]-COOH.

[0478] In some embodiments, the fusion protein can comprise a deaminase flanked by an N-terminal fragment and a C-terminal fragment of a Cas9 or Cas12 polypeptide. In some embodiments, the fusion protein comprises a cytidine deaminase flanked by an N-terminal fragment and a C-terminal fragment of a Cas9 or Cas12 polypeptide. In some embodiments, the fusion protein comprises an adenosine deaminase flanked by an N-terminal fragment and a C-terminal fragment of a Cas9 or Cas12 polypeptide.

[0479] In some embodiments, the fusion proteins comprising a cytidine deaminase or adenosine deaminase and a napDNAbp (e.g., Cas9 or Cas12 domain) do not include a linker sequence. In some embodiments, a linker is present between the cytidine or adenosine deaminase and the napDNAbp. In some embodiments, the “-” used in the general architecture above indicates the presence of an optional linker. In some embodiments, cytidine or adenosine deaminase and the napDNAbp are fused via any of the linkers provided herein. For example, in some embodiments the cytidine or adenosine deaminase and the napDNAbp are fused via any of the linkers provided herein.

[0480] It should be appreciated that the fusion proteins of the present disclosure may comprise one or more additional features. For example, in some embodiments, the fusion protein may comprise inhibitors, cytoplasmic localization sequences, export sequences, such as nuclear export sequences, or other localization sequences, as well as sequence tags that are useful for solubilization, purification, or detection of the fusion proteins. Suitable protein tags provided herein include, but are not limited to, biotin carboxylase carrier protein (BCCP) tags, myc-tags, calmodulin-tags, FLAG-tags, hemagglutinin (HA)-tags, polyhistidine tags, also referred to as histidine tags or His-tags, maltose binding protein (MBP)-tags, nus-tags, glutathione-S-transferase (GST)-tags, green fluorescent protein (GFP)-tags, thioredoxin-tags, S-tags, Softags (e.g., Softag 1, Softag 3), strep-tags, biotin ligase tags, FlAsH tags, V5 tags, and SBP-tags. Additional suitable sequences will be apparent to those of skill in the art. In some embodiments, the fusion protein comprises one or more His tags.

[0481] Exemplary, yet nonlimiting, fusion proteins are described in International PCT Application Nos. PCT/2017/044935, PCT/US2019/044935, and PCT/US2020/016288, each of which is incorporated herein by reference for its entirety.

### Fusion Proteins Comprising a Nuclear Localization Sequence (NLS)

[0482] In some embodiments, the fusion proteins provided herein further comprise one or more (e.g., 2, 3, 4, 5) nuclear targeting sequences, for example a nuclear localization sequence (NLS). In one embodiment, a bipartite NLS is used. In some embodiments, a NLS comprises an amino acid sequence that facilitates the importation of a protein, that comprises an NLS, into the cell nucleus (e.g., by nuclear transport). In some embodiments, the NLS is fused to the N-terminus or the C-terminus of the fusion protein. In some embodiments, the NLS is fused to the C-terminus or N-terminus of an nCas9 domain or a dCas9 domain. In some embodiments, the NLS is fused to the N-terminus or C-terminus of the Cas12 domain. In some embodiments, the NLS is fused to the N-terminus or C-terminus of the cytidine or adenosine deaminase. In some embodiments, the NLS is fused to the fusion protein via one or more linkers. In some embodiments, the NLS is fused to the fusion protein without a linker. In some embodiments, the NLS comprises an amino acid sequence of any one of the NLS sequences provided or referenced herein. Additional nuclear localization sequences are known in the art and would be apparent to the skilled artisan. For example, NLS sequences are described in Plank et al., PCT/EP2000/011690, the contents of which are incorporated herein by reference for their disclosure of exemplary nuclear localization sequences. In some embodiments, an NLS comprises the amino acid sequence

(SEQ ID NO: 253)
PKKKRKVEGADKRTADGSEFESPKKKRKV,
(SEQ ID NO: 83)
KRTADGSEFESPKKKRKV,
(SEQ ID NO: 84)
KRPAATKKAGQAKKKK,
(SEQ ID NO: 85)
KKTELQTTNAENKTKKL,
(SEQ ID NO: 86)
KRGINDRNFWRGENGRKTR,
(SEQ ID NO: 254)
RKSGKIAAIVVKRPRKPKKKRKV,
or
(SEQ ID NO: 89)
MDSLLMNRRKFLYQFKNVRWAKGRRETYLC.

[0483] In some embodiments, the fusion proteins comprising a cytidine or adenosine deaminase, a Cas9 domain, and an NLS do not comprise a linker sequence. In some embodiments, linker sequences between one or more of the domains or proteins (e.g., cytidine or adenosine deaminase, Cas9 domain or NLS) are present. In some embodiments, a linker is present between the cytidine deaminase and adenosine deaminase domains and the napDNAbp. In some embodiments, the “-” used in the general architecture below indicates the presence of an optional linker. In some embodiments, the cytidine deaminase and adenosine deaminase and the napDNAbp are fused via any of the linkers provided herein. For example, in some embodiments the cytidine deaminase and adenosine deaminase and the napDNAbp are fused via any of the linkers provided herein.

[0484] In some embodiments, the general architecture of exemplary napDNAbp (e.g., Cas9 or Cas12) fusion proteins with a cytidine or adenosine deaminase and a napDNAbp (e.g., Cas9 or Cas12) domain comprises any one of the following structures, where NLS is a nuclear localization sequence (e.g., any NLS provided herein), NH₂ is the N-terminus of the fusion protein, and COOH is the C-terminus of the fusion protein:

NH₂-NLS-[cytidine deaminase]-[napDNAbp domain]-COOH;
NH₂-NLS [napDNAbp domain]-[cytidine deaminase]-COOH;
NH₂-[cytidine deaminase]-[napDNAbp domain]-NLS—COOH;
NH₂-[napDNAbp domain]-[cytidine deaminase]-NLS—COOH;
NH₂-NLS-[adenosine deaminase]-[napDNAbp domain]-COOH;
NH₂-NLS [napDNAbp domain]-[adenosine deaminase]-COOH,
NH₂-[adenosine deaminase]-[napDNAbp domain]-NLS—COOH;
NH₂-[napDNAbp domain]-[adenosine deaminase]-NLS—COOH;
NH₂-NLS-[cytidine deaminase]-[napDNAbp domain]-[adenosine deaminase]-COOH;
NH₂-NLS-[adenosine deaminase]-[napDNAbp domain]-[cytidine deaminase]-COOH;
NH₂-NLS-[adenosine deaminase] [cytidine deaminase]-[napDNAbp domain]-COOH;
NH₂-NLS-[cytidine deaminase]-[adenosine deaminase]-[napDNAbp domain]-COOH;
NH₂-NLS-[napDNAbp domain]-[adenosine deaminase]-[cytidine deaminase]-COOH;
NH₂-NLS-[napDNAbp domain]-[cytidine deaminase]-[adenosine deaminase]-COOH;
NH₂-[cytidine deaminase]-[napDNAbp domain]-[adenosine deaminase]-NLS—COOH;
NH₂-[adenosine deaminase]-[napDNAbp domain]-[cytidine deaminase]-NLS—COOH:
NH₂-[adenosine deaminase] [cytidine deaminase]-[napDNAbp domain]-NLS—COOH;
NH₂-[cytidine deaminase]-[adenosine deaminase]-[napDNAbp domain]-NLS—COOH;
NH₂-[napDNAbp domain]-[adenosine deaminase]-[cytidine deaminase]-NLS—COOH; or

[0485] NH₂-[napDNAbp domain]-[cytidine deaminase]-[adenosine deaminase]-NLS-COOH. In some embodiments, the NLS is present in a linker or the NLS is flanked by linkers, for example described herein. A bipartite NLS comprises two basic amino acid clusters, which are separated by a relatively short spacer sequence (hence bipartite—2 parts, while monopartite NLSs are not). The NLS of nucleoplasmin, KR[PAATKKAGQA]KKKK (SEQ ID NO: 84), is the prototype of the ubiquitous bipartite signal: two clusters of basic amino acids, separated by a spacer of about 10 amino acids. The sequence of an exemplary bipartite NLS follows: PKKKRKVEGADKRTADGSEFESPKKKRKV (SEQ ID NO: 253)

[0486] A vector that encodes a CRISPR enzyme comprising one or more nuclear localization sequences (NLSs) can be used. For example, there can be or be about 1, 2, 3, 4, 5, 6, 7, 8, 9, 10 NLSs used. A CRISPR enzyme can comprise the NLSs at or near the amino-terminus, about or more than about 1, 2, 3, 4, 5, 6, 7, 8, 9, 10 NLSs at or near the carboxy-terminus, or any combination thereof (e.g., one or more NLS at the amino-terminus and one or more NLS at the carboxy terminus). When more than one NLS is present, each can be selected independently of others, such that a single NLS can be present in more than one copy and/or in combination with one or more other NLSs present in one or more copies.

[0487] CRISPR enzymes used in the methods can comprise about 6 NLSs. An NLS is considered near the N- or C-terminus when the nearest amino acid to the NLS is within about 50 amino acids along a polypeptide chain from the N- or C-terminus, e.g., within 1, 2, 3, 4, 5, 10, 15, 20, 25, 30, 40, or 50 amino acids.

### Additional Domains

[0488] A base editor described herein can include any domain which helps to facilitate the nucleobase editing, modification or altering of a nucleobase of a polynucleotide. In some embodiments, a base editor comprises a polynucleotide programmable nucleotide binding domain (e.g., Cas9), a nucleobase editing domain (e.g., deaminase domain), and one or more additional domains. In some embodiments, the additional domain can facilitate enzymatic or catalytic functions of the base editor, binding functions of the base editor, or be inhibitors of cellular machinery (e.g., enzymes) that could interfere with the desired base editing result. In some embodiments, a base editor can comprise a nuclease, a nickase, a recombinase, a deaminase, a methyltransferase, a methylase, an acetylase, an acetyltransferase, a transcriptional activator, or a transcriptional repressor domain.

[0489] In some embodiments, a base editor can comprise an uracil glycosylase inhibitor (UGI) domain. In some embodiments, cellular DNA repair response to the presence of U: G heteroduplex DNA can be responsible for a decrease in nucleobase editing efficiency in cells. In such embodiments, uracil DNA glycosylase (UDG) can catalyze removal of U from DNA in cells, which can initiate base excision repair (BER), mostly resulting in reversion of the U:G pair to a C:G pair. In such embodiments, BER can be inhibited in base editors comprising one or more domains that bind the single strand, block the edited base, inhibit UGI, inhibit BER, protect the edited base, and/or promote repairing of the non-edited strand. Thus, this disclosure contemplates a base editor fusion protein comprising a UGI domain.

[0490] In some embodiments, a base editor comprises as a domain all or a portion of a double-strand break (DSB) binding protein. For example, a DSB binding protein can include a Gam protein of bacteriophage Mu that can bind to the ends of DSBs and can protect them from degradation. See Komor, A. C., et al., “Improved base excision repair inhibition and bacteriophage Mu Gam protein yields C:G-to-T:A base editors with higher efficiency and product purity” Science Advances 3:eaao4774 (2017), the entire content of which is hereby incorporated by reference.

[0491] Additionally, in some embodiments, a Gam protein can be fused to an N terminus of a base editor. In some embodiments, a Gam protein can be fused to a C terminus of a base editor. The Gam protein of bacteriophage Mu can bind to the ends of double strand breaks (DSBs) and protect them from degradation. In some embodiments, using Gam to bind the free ends of DSB can reduce indel formation during the process of base editing. In some embodiments, 174-residue Gam protein is fused to the N terminus of the base editors. See Komor, A. C., et al., “Improved base excision repair inhibition and bacteriophage Mu Gam protein yields C:G-to-T:A base editors with higher efficiency and product purity” Science Advances 3:eaao4774 (2017). In some embodiments, a mutation or mutations can change the length of a base editor domain relative to a wild type domain. For example, a deletion of at least one amino acid in at least one domain can reduce the length of the base editor. In another case, a mutation or mutations do not change the length of a domain relative to a wild type domain. For example, substitutions in any domain does not change the length of the base editor.

[0492] Non-limiting examples of such base editors, where the length of all the domains is the same as the wild type domains, can include:

NH2-[nucleobase editing domain]-Linker1-[APOBEC1]-Linker2-[nucleobase editing domain]-COOH;
NH2-[nucleobase editing domain]-Linker1-[APOBEC1]-[nucleobase editing domain]-COOH;
NH2-[nucleobase editing domain]-[APOBEC1]-Linker2-[nucleobase editing domain]-COOH;
NH2-[nucleobase editing domain]-[APOBEC1]-[nucleobase editing domain]-COOH;
NH2-[nucleobase editing domain]-Linker1-[APOBEC1]-Linker2-[nucleobase editing domain]-[UGI]-COOH;
NH2-[nucleobase editing domain]-Linker1-[APOBEC1]-[nucleobase editing domain]-[UGI]-COOH;
NH2-[nucleobase editing domain]-[APOBEC1]-Linker2-[nucleobase editing domain]-[UGI]-COOH;
NH2-[nucleobase editing domain]-[APOBEC1]-[nucleobase editing domain]-[UGI]-COOH;
NH2-[UGI]-[nucleobase editing domain]-Linker1-[APOBEC1]-Linker2-[nucleobase editing domain]-COOH;
NH2-[UGI]-[nucleobase editing domain]-Linker1-[APOBEC1]-[nucleobase editing domain]-COOH:
NH2-[UGI]-[nucleobase editing domain]-[APOBEC1]-Linker2-[nucleobase editing domain]-COOH; or
NH2-[UGI]-[nucleobase editing domain]-[APOBEC1]-[nucleobase editing domain]-COOH.

### Base Editor System

[0493] Provided herein are systems, compositions, and methods for editing a nucleobase using a base editor system. In some embodiments, the base editor system comprises (1) a base editor (BE) comprising a polynucleotide programmable nucleotide binding domain and a nucleobase editing domain (e.g., a deaminase domain) for editing the nucleobase; and (2) a guide polynucleotide (e.g., guide RNA) in conjunction with the polynucleotide programmable nucleotide binding domain. In some embodiments, the base editor system is a cytidine base editor (CBE) or an adenosine base editor (ABE). In some embodiments, the polynucleotide programmable nucleotide binding domain is a polynucleotide programmable DNA or RNA binding domain. In some embodiments, the nucleobase editing domain is a deaminase domain. In some embodiments, a deaminase domain can be a cytidine deaminase or a cytosine deaminase. In some embodiments, a deaminase domain can be an adenine deaminase or an adenosine deaminase. In some embodiments, the adenosine base editor can deaminate adenine in DNA. In some embodiments, the base editor is capable of deaminating a cytidine in DNA.

[0494] In some embodiments, a base editing system as provided herein provides a new approach to genome editing that uses a fusion protein containing a catalytically defective Streptococcus pyogenes Cas9, a deaminase (e.g., cytidine or adenosine deaminase), and an inhibitor of base excision repair to induce programmable, single nucleotide (C→T or A→G) changes in DNA without generating double-strand DNA breaks, without requiring a donor DNA template, and without inducing an excess of stochastic insertions and deletions.

[0495] Details of nucleobase editing proteins are described in International PCT Application Nos. PCT/2017/045381 (WO2018/027078) and PCT/US2016/058344 (WO2017/070632), each of which is incorporated herein by reference for its entirety. Also see Komor, A. C., et al., “Programmable editing of a target base in genomic DNA without double-stranded DNA cleavage” Nature 533, 420-424 (2016); Gaudelli, N. M., et al., “Programmable base editing of A⋅T to G⋅C in genomic DNA without DNA cleavage” Nature 551, 464-471 (2017); and Komor, A. C., et al., “Improved base excision repair inhibition and bacteriophage Mu Gam protein yields C:G-to-T:A base editors with higher efficiency and product purity” Science Advances 3:eaao4774 (2017), the entire contents of which are hereby incorporated by reference.

[0496] Use of the base editor system provided herein comprises the steps of: (a) contacting a target nucleotide sequence of a polynucleotide (e.g., double- or single stranded DNA or RNA) of a subject with a base editor system comprising a nucleobase editor (e.g., an adenosine base editor or a cytidine base editor) and a guide polynucleic acid (e.g., gRNA), wherein the target nucleotide sequence comprises a targeted nucleobase pair: (b) inducing strand separation of said target region; (c) converting a first nucleobase of said target nucleobase pair in a single strand of the target region to a second nucleobase; and (d) cutting no more than one strand of said target region, where a third nucleobase complementary to the first nucleobase base is replaced by a fourth nucleobase complementary to the second nucleobase. It should be appreciated that in some embodiments, step (b) is omitted. In some embodiments, said targeted nucleobase pair is a plurality of nucleobase pairs in one or more genes. In some embodiments, the base editor system provided herein is capable of multiplex editing of a plurality of nucleobase pairs in one or more genes. In some embodiments, the plurality of nucleobase pairs is located in the same gene. In some embodiments, the plurality of nucleobase pairs is located in one or more genes, wherein at least one gene is located in a different locus.

[0497] In some embodiments, the cut single strand (nicked strand) is hybridized to the guide nucleic acid. In some embodiments, the cut single strand is opposite to the strand comprising the first nucleobase. In some embodiments, the base editor comprises a Cas9 domain. In some embodiments, the first base is adenine, and the second base is not a G, C, A, or T. In some embodiments, the second base is inosine.

[0498] In some embodiments, a single guide polynucleotide may be utilized to target a deaminase to a target nucleic acid sequence. In some embodiments, a single pair of guide polynucleotides may be utilized to target different deaminases to a target nucleic acid sequence.

[0499] The nucleobase components and the polynucleotide programmable nucleotide binding component of a base editor system may be associated with each other covalently or non-covalently. For example, in some embodiments, the deaminase domain can be targeted to a target nucleotide sequence by a polynucleotide programmable nucleotide binding domain. In some embodiments, a polynucleotide programmable nucleotide binding domain can be fused or linked to a deaminase domain. In some embodiments, a polynucleotide programmable nucleotide binding domain can target a deaminase domain to a target nucleotide sequence by non-covalently interacting with or associating with the deaminase domain. For example, in some embodiments, the nucleobase editing component, e.g., the deaminase component can comprise an additional heterologous portion or domain that is capable of interacting with, associating with, or capable of forming a complex with an additional heterologous portion or domain that is part of a polynucleotide programmable nucleotide binding domain. In some embodiments, the additional heterologous portion may be capable of binding to, interacting with, associating with, or forming a complex with a polypeptide. In some embodiments, the additional heterologous portion may be capable of binding to, interacting with, associating with, or forming a complex with a polynucleotide. In some embodiments, the additional heterologous portion may be capable of binding to a guide polynucleotide. In some embodiments, the additional heterologous portion may be capable of binding to a polypeptide linker. In some embodiments, the additional heterologous portion may be capable of binding to a polynucleotide linker. The additional heterologous portion may be a protein domain. In some embodiments, the additional heterologous portion may be a K Homology (KH) domain, a MS2 coat protein domain, a PP7 coat protein domain, a SfMu Com coat protein domain, a sterile alpha motif, a telomerase Ku binding motif and Ku protein, a telomerase Sm7 binding motif and Sm7 protein, or an RNA recognition motif.

[0500] A base editor system may further comprise a guide polynucleotide component. It should be appreciated that components of the base editor system may be associated with each other via covalent bonds, noncovalent interactions, or any combination of associations and interactions thereof. In some embodiments, a deaminase domain can be targeted to a target nucleotide sequence by a guide polynucleotide. For example, in some embodiments, the nucleobase editing component of the base editor system, e.g., the deaminase component, can comprise an additional heterologous portion or domain (e.g., polynucleotide binding domain such as an RNA or DNA binding protein) that is capable of interacting with, associating with, or capable of forming a complex with a portion or segment (e.g., a polynucleotide motif) of a guide polynucleotide. In some embodiments, the additional heterologous portion or domain (e.g., polynucleotide binding domain such as an RNA or DNA binding protein) can be fused or linked to the deaminase domain. In some embodiments, the additional heterologous portion may be capable of binding to, interacting with, associating with, or forming a complex with a polypeptide. In some embodiments, the additional heterologous portion may be capable of binding to, interacting with, associating with, or forming a complex with a polynucleotide. In some embodiments, the additional heterologous portion may be capable of binding to a guide polynucleotide. In some embodiments, the additional heterologous portion may be capable of binding to a polypeptide linker. In some embodiments, the additional heterologous portion may be capable of binding to a polynucleotide linker. The additional heterologous portion may be a protein domain. In some embodiments, the additional heterologous portion may be a K Homology (KH) domain, a MS2 coat protein domain, a PP7 coat protein domain, a SfMu Com coat protein domain, a sterile alpha motif, a telomerase Ku binding motif and Ku protein, a telomerase Sm7 binding motif and Sm7 protein, or an RNA recognition motif.

[0501] In some embodiments, a base editor system can further comprise an inhibitor of base excision repair (BER) component. It should be appreciated that components of the base editor system may be associated with each other via covalent bonds, noncovalent interactions, or any combination of associations and interactions thereof. The inhibitor of BER component may comprise a base excision repair inhibitor. In some embodiments, the inhibitor of base excision repair can be a uracil DNA glycosylase inhibitor (UGI). In some embodiments, the inhibitor of base excision repair can be an inosine base excision repair inhibitor. In some embodiments, the inhibitor of base excision repair can be targeted to the target nucleotide sequence by the polynucleotide programmable nucleotide binding domain. In some embodiments, a polynucleotide programmable nucleotide binding domain can be fused or linked to an inhibitor of base excision repair. In some embodiments, a polynucleotide programmable nucleotide binding domain can be fused or linked to a deaminase domain and an inhibitor of base excision repair. In some embodiments, a polynucleotide programmable nucleotide binding domain can target an inhibitor of base excision repair to a target nucleotide sequence by non-covalently interacting with or associating with the inhibitor of base excision repair. For example, in some embodiments, the inhibitor of base excision repair component can comprise an additional heterologous portion or domain that is capable of interacting with, associating with, or capable of forming a complex with an additional heterologous portion or domain that is part of a polynucleotide programmable nucleotide binding domain. In some embodiments, the inhibitor of base excision repair can be targeted to the target nucleotide sequence by the guide polynucleotide. For example, in some embodiments, the inhibitor of base excision repair can comprise an additional heterologous portion or domain (e.g., polynucleotide binding domain such as an RNA or DNA binding protein) that is capable of interacting with, associating with, or capable of forming a complex with a portion or segment (e.g., a polynucleotide motif) of a guide polynucleotide. In some embodiments, the additional heterologous portion or domain of the guide polynucleotide (e.g., polynucleotide binding domain such as an RNA or DNA binding protein) can be fused or linked to the inhibitor of base excision repair. In some embodiments, the additional heterologous portion may be capable of binding to, interacting with, associating with, or forming a complex with a polynucleotide. In some embodiments, the additional heterologous portion may be capable of binding to a guide polynucleotide. In some embodiments, the additional heterologous portion may be capable of binding to a polypeptide linker. In some embodiments, the additional heterologous portion may be capable of binding to a polynucleotide linker. The additional heterologous portion may be a protein domain. In some embodiments, the additional heterologous portion may be a K Homology (KH) domain, a MS2 coat protein domain, a PP7 coat protein domain, a SfMu Com coat protein domain, a sterile alpha motif, a telomerase Ku binding motif and Ku protein, a telomerase Sm7 binding motif and Sm7 protein, or an RNA recognition motif.

[0502] In some embodiments, the base editor inhibits base excision repair (BER) of the edited strand. In some embodiments, the base editor protects or binds the non-edited strand. In some embodiments, the base editor comprises UGI activity. In some embodiments, the base editor comprises a catalytically inactive inosine-specific nuclease. In some embodiments, the base editor comprises nickase activity. In some embodiments, the intended edit of base pair is upstream of a PAM site. In some embodiments, the intended edit of base pair is 1, 2, 3, 4, 5, 6, 7, 8, 9, 10, 11, 12, 13, 14, 15, 16, 17, 18, 19, or nucleotides upstream of the PAM site. In some embodiments, the intended edit of base-pair is downstream of a PAM site. In some embodiments, the intended edited base pair is 1, 2, 3, 4, 5, 6, 7, 8, 9, 10, 11, 12, 13, 14, 15, 16, 17, 18, 19, or 20 nucleotides downstream stream of the PAM site.

[0503] In some embodiments, the method does not require a canonical (e.g., NGG) PAM site. In some embodiments, the nucleobase editor comprises a linker or a spacer. In some embodiments, the linker or spacer is 1-25 amino acids in length. In some embodiments, the linker or spacer is 5-20 amino acids in length. In some embodiments, the linker or spacer is 10, 11, 12, 13, 14, 15, 16, 17, 18, 19, or 20 amino acids in length.

[0504] In some embodiments, the base editing fusion proteins provided herein need to be positioned at a precise location, for example, where a target base is placed within a defined region (e.g., a “deamination window”). In some embodiments, a target can be within a 4 base region. In some embodiments, such a defined target region can be approximately 15 bases upstream of the PAM. See Komor, A. C., et al., “Programmable editing of a target base in genomic DNA without double-stranded DNA cleavage” Nature 533, 420-424 (2016); Gaudelli, N. M., et al., “Programmable base editing of A⋅T to G⋅C in genomic DNA without DNA cleavage” Nature 551, 464-471 (2017); and Komor, A. C., et al., “Improved base excision repair inhibition and bacteriophage Mu Gam protein yields C:G-to-T:A base editors with higher efficiency and product purity” Science Advances 3:eaao4774 (2017), the entire contents of which are hereby incorporated by reference.

[0505] In some embodiments, the target region comprises a target window, wherein the target window comprises the target nucleobase pair. In some embodiments, the target window comprises 1-10 nucleotides. In some embodiments, the target window is 1, 2, 3, 4, 5, 6, 7, 8, 9, 10, 11, 12, 13, 14, 15, 16, 17, 18, 19, or 20 nucleotides in length. In some embodiments, the intended edit of base pair is within the target window. In some embodiments, the target window comprises the intended edit of base pair. In some embodiments, the method is performed using any of the base editors provided herein. In some embodiments, a target window is a deamination window. A deamination window can be the defined region in which a base editor acts upon and deaminates a target nucleotide. In some embodiments, the deamination window is within a 2, 3, 4, 5, 6, 7, 8, 9, or 10 base regions. In some embodiments, the deamination window is 5, 6, 7, 8, 9, 10, 11, 12, 13, 14, 15, 16, 17, 18, 19, 20, 21, 22, 23, 24, or 25 bases upstream of the PAM.

[0506] The base editors of the present disclosure can comprise any domain, feature or amino acid sequence which facilitates the editing of a target polynucleotide sequence. For example, in some embodiments, the base editor comprises a nuclear localization sequence (NLS). In some embodiments, an NLS of the base editor is localized between a deaminase domain and a polynucleotide programmable nucleotide binding domain. In some embodiments, an NLS of the base editor is localized C-terminal to a polynucleotide programmable nucleotide binding domain.

[0507] Other exemplary features that can be present in a base editor as disclosed herein are localization sequences, such as cytoplasmic localization sequences, export sequences, such as nuclear export sequences, or other localization sequences, as well as sequence tags that are useful for solubilization, purification, or detection of the fusion proteins. Suitable protein tags provided herein include, but are not limited to, biotin carboxylase carrier protein (BCCP) tags, myc-tags, calmodulin-tags, FLAG-tags, hemagglutinin (HA)-tags, polyhistidine tags, also referred to as histidine tags or His-tags, maltose binding protein (MBP)-tags, nus-tags, glutathione-S-transferase (GST)-tags, green fluorescent protein (GFP)-tags, thioredoxin-tags, S-tags, Softags (e.g., Softag 1, Softag 3), strep-tags, biotin ligase tags, FlAsH tags, V5 tags, and SBP-tags. Additional suitable sequences will be apparent to those of skill in the art. In some embodiments, the fusion protein comprises one or more His tags.

[0508] In some embodiments, non-limiting exemplary cytidine base editors (CBE) include BE1 (APOBEC1-XTEN-dCas9), BE2 (APOBEC1-XTEN-dCas9-UGI), BE3 (APOBEC1-XTEN-dCas9(A840H)-UGI), BE3-Gam, saBE3, saBE4-Gam, BE4, BE4-Gam, saBE4, or saB4E-Gam. BE4 extends the APOBEC1-Cas9n(D10A) linker to 32 amino acids and the Cas9n-UGI linker to 9 amino acids, and appends a second copy of UGI to the C-terminus of the construct with another 9-amino acid linker into a single base editor construct. The base editors saBE3 and saBE4 have the S. pyogenes Cas9n(D10A) replaced with the smaller S. aureus Cas9n(D10A). BE3-Gam, saBE3-Gam, BE4-Gam, and saBE4-Gam have 174 residues of Gam protein fused to the N-terminus of BE3, saBE3, BE4, and saBE4 via the 16 amino acid XTEN linker.

[0509] In some embodiments, the adenosine base editor (ABE) can deaminate adenine in DNA. In some embodiments, ABE is generated by replacing APOBEC1 component of BE3 with natural or engineered E. coli TadA, human ADAR2, mouse ADA, or human ADAT2. In some embodiments, ABE comprises evolved TadA variant. In some embodiments, the ABE is ABE 1.2 (TadA*-XTEN-nCas9-NLS). In some embodiments, TadA* comprises A106V and D108N mutations.

[0510] In some embodiments, the ABE is a second-generation ABE. In some embodiments, the ABE is ABE2.1, which comprises additional mutations D147Y and E155V in TadA* (TadA*2.1). In some embodiments, the ABE is ABE2.2, ABE2.1 fused to catalytically inactivated version of human alkyl adenine DNA glycosylase (AAG with E125Q mutation). In some embodiments, the ABE is ABE2.3, ABE2.1 fused to catalytically inactivated version of E. coli Endo V (inactivated with D35A mutation). In some embodiments, the ABE is ABE2.6 which has a linker twice as long (32 amino acids, (SGGS)₂ (SEQ ID NO: 255)-XTEN-(SGGS)₂ (SEQ ID NO: 255)) as the linker in ABE2.1. In some embodiments, the ABE is ABE2.7, which is ABE2.1 tethered with an additional wild-type TadA monomer. In some embodiments, the ABE is ABE2.8, which is ABE2.1 tethered with an additional TadA*2.1 monomer. In some embodiments, the ABE is ABE2.9, which is a direct fusion of evolved TadA (TadA*2.1) to the N-terminus of ABE2.1. In some embodiments, the ABE is ABE2.10, which is a direct fusion of wild-type TadA to the N-terminus of ABE2.1. In some embodiments, the ABE is ABE2.11, which is ABE2.9 with an inactivating E59A mutation at the N-terminus of TadA* monomer. In some embodiments, the ABE is ABE2.12, which is ABE2.9 with an inactivating E59A mutation in the internal TadA* monomer.

[0511] In some embodiments, the ABE is a third generation ABE. In some embodiments, the ABE is ABE3.1, which is ABE2.3 with three additional TadA mutations (L84F, H123Y, and I156F).

[0512] In some embodiments, the ABE is a fourth generation ABE. In some embodiments, the ABE is ABE4.3, which is ABE3.1 with an additional TadA mutation A142N (TadA*4.3).

[0513] In some embodiments, the ABE is a fifth generation ABE. In some embodiments, the ABE is ABE5.1, which is generated by importing a consensus set of mutations from surviving clones (H36L, R51L, S146C, and K157N) into ABE3.1. In some embodiments, the ABE is ABE5.3, which has a heterodimeric construct containing wild-type E. coli TadA fused to an internal evolved TadA*. In some embodiments, the ABE is ABE5.2, ABE5.4, ABE5.5, ABE5.6, ABE5.7, ABE5.8, ABE5.9, ABE5.10, ABE5.1, ABE5.12, ABE5.13, or ABE5.14, as shown in Table 11 below. In some embodiments, the ABE is a sixth generation ABE. In some embodiments, the ABE is ABE6.1, ABE6.2, ABE6.3, ABE6.4, ABE6.5, or ABE6.6, as shown in Table 11 below. In some embodiments, the ABE is a seventh generation ABE. In some embodiments, the ABE is ABE7.1, ABE7.2, ABE7.3, ABE7.4, ABE7.5, ABE7.6, ABE7.7, ABE7.8, ABE 7.9, or

TABLE 11
Genotypes of ABEs

| | 23 | 26 | 36 | 37 | 48 | 49 | 51 | 72 | 84 | 87 | 106 | 108 | 123 | 125 | 142 | 146 | 147 | 152 | 155 | 156 | 157 | 61 |
|---|---|---|---|---|---|---|---|---|---|---|---|---|---|---|---|---|---|---|---|---|---|---|
| ABE0.1 | W | R | H | N | P | | R | N | L | S | A | D | H | G | A | S | D | R | E | I | K | K |
| ABE0.2 | W | R | H | N | P | | R | N | L | S | A | D | H | G | A | S | D | R | E | I | K | K |
| ABE1.1 | W | R | H | N | P | | R | N | L | S | A | N | H | G | A | S | D | R | E | I | K | K |
| ABE1.2 | W | R | H | M | P | | R | M | L | S | V | N | H | G | A | S | D | R | E | I | K | K |
| ABE2.1 | W | R | H | N | P | | R | N | L | S | V | N | H | G | A | S | Y | R | V | I | K | K |
| ABE2.2 | W | R | H | N | P | | R | N | L | S | V | N | H | G | A | S | Y | R | V | I | K | K |
| ABE2.3 | W | R | H | N | P | | R | N | L | S | V | N | H | G | A | S | Y | R | V | I | K | K |
| ABE2.4 | W | R | H | N | P | | R | N | L | S | V | N | H | G | A | S | Y | R | V | I | K | K |
| ABE2.5 | W | R | H | N | P | | R | N | I | S | V | N | H | G | A | S | Y | R | V | I | K | K |
| ABE2.6 | W | R | H | N | P | | R | N | L | S | V | N | H | G | A | S | Y | R | V | I | K | K |
| ABE2.7 | W | R | H | N | P | | R | N | L | S | V | N | H | G | A | S | Y | R | V | I | K | K |
| ABE2.8 | W | R | H | N | P | | R | N | L | S | V | N | H | G | A | S | Y | R | V | I | K | K |
| ABE2.9 | W | R | H | M | P | | R | M | L | S | V | N | H | G | A | S | Y | R | V | I | K | K |
| ABE2.10 | W | R | H | N | P | | R | N | L | S | V | N | H | G | A | S | Y | R | V | I | K | K |
| ABE2.11 | W | R | H | N | P | | R | N | L | S | V | N | H | G | A | S | Y | R | V | I | K | K |
| ABE2.12 | W | R | H | N | P | | R | N | L | S | V | N | H | G | A | S | Y | R | V | I | K | K |
| ABE3.1 | W | R | H | N | P | | R | N | F | S | V | N | Y | G | A | S | Y | R | V | F | K | K |
| ABE3.2 | W | R | H | N | P | | R | N | F | S | V | N | Y | G | A | S | Y | R | V | F | K | K |
| ABE3.3 | W | R | H | N | P | | R | N | F | S | V | N | Y | G | A | S | Y | R | V | F | K | K |
| ABE3.4 | W | R | H | N | P | | R | N | F | S | V | N | Y | G | A | S | Y | R | V | F | K | K |
| ABE3.5 | W | R | H | N | P | | R | N | F | S | V | N | Y | G | A | S | Y | R | V | F | K | K |
| ABE3.6 | W | R | H | M | P | | R | M | F | S | V | N | Y | G | A | S | Y | R | V | F | K | K |
| ABES.7 | W | R | H | N | P | | R | N | F | S | V | N | Y | G | A | S | Y | R | V | F | K | K |
| ABE3.8 | W | R | H | N | P | | R | N | F | S | v | N | Y | G | A | S | Y | R | V | F | K | K |
| ABE4.1 | W | R | H | N | P | | R | N | L | S | V | N | H | G | N | S | Y | R | V | I | K | K |
| ABE4.2 | W | G | H | N | P | | R | N | L | S | V | N | H | G | N | S | Y | R | V | I | K | K |
| ABE4.3 | W | R | H | N | P | | R | N | F | S | V | N | Y | G | N | S | Y | R | V | F | K | K |
| ABE5.1 | W | R | L | N | P | | L | N | F | S | V | N | Y | G | A | C | Y | R | V | F | N | K |
| ABE5.2 | W | R | H | S | P | | R | N | F | S | V | N | Y | G | A | S | Y | R | V | F | K | T |
| ABE5.3 | W | R | L | N | P | | L | N | L | S | V | N | Y | G | A | C | Y | R | V | F | N | K |
| ABE5.4 | W | R | H | s | P | | R | N | F | S | V | N | Y | G | A | S | Y | R | V | F | K | T |
| ABE5.5 | W | R | L | N | P | | L | N | F | S | V | N | Y | G | A | C | Y | R | V | F | N | K |
| ABES.6 | W | R | L | N | P | | E | N | F | S | V | N | Y | G | A | C | Y | R | V | F | N | K |
| ABE5.7 | W | R | L | N | P | | L | N | F | S | V | N | Y | G | A | C | Y | R | V | F | N | K |
| ABES.8 | W | R | L | N | P | | L | N | F | S | V | N | Y | G | A | C | Y | R | V | F | N | K |
| ABE5.9 | W | R | L | N | P | | L | N | F | S | V | N | Y | G | A | C | Y | R | V | F | N | K |
| ABE5.10 | W | R | L | N | P | | L | N | F | S | V | N | Y | G | A | C | Y | R | V | F | N | K |
| ABE5.11 | W | R | L | N | P | | L | N | F | S | V | N | Y | G | A | C | Y | R | V | F | N | K |
| ABE5.12 | W | R | L | N | P | | L | N | F | S | V | N | Y | G | A | C | Y | R | V | F | N | K |
| ABE5.13 | W | R | H | N | P | | L | D | F | S | V | N | Y | A | A | S | Y | R | V | F | K | K |
| ABE5.14 | W | R | H | N | S | | L | N | F | C | V | N | Y | G | A | S | Y | R | V | F | K | K |
| ABE6.1 | W | R | H | N | S | | E | N | F | S | V | N | Y | G | N | S | Y | R | V | F | K | K |
| ABE6.2 | W | R | H | N | T | V | L | N | F | S | V | N | Y | G | N | S | Y | R | V | F | N | K |
| ABE6.3 | W | R | L | N | S | | L | N | F | S | V | N | Y | G | A | C | Y | R | V | F | N | K |
| ABE6.4 | W | R | L | N | S | | L | N | F | S | V | N | Y | G | N | C | Y | R | V | F | N | K |
| ABE6.5 | W | R | L | N | T | V | L | N | F | S | V | N | Y | G | A | C | Y | R | V | F | N | K |
| ABE6.6 | W | R | L | N | T | V | L | N | F | S | V | N | Y | G | N | C | Y | R | V | F | N | K |
| ABE7.1 | W | R | L | N | A | | L | N | F | S | V | N | Y | G | A | C | Y | R | V | F | N | K |
| ABE7.2 | W | R | L | N | A | | L | N | F | S | V | N | Y | G | N | C | Y | R | V | F | N | K |
| ABE7.3 | W | R | L | N | A | | L | N | F | S | V | N | Y | G | A | C | Y | R | V | F | N | K |
| ABE7.4 | W | R | L | N | A | | E | N | F | S | V | N | Y | G | A | C | Y | R | V | F | N | K |
| ABE7.5 | W | R | L | N | A | | L | N | F | S | V | N | Y | G | A | C | Y | H | V | F | N | K |
| ABE7.6 | W | R | L | N | A | | L | N | I | S | V | N | Y | G | A | C | Y | P | V | F | N | K |
| ABE7.7 | W | R | L | N | A | | L | N | F | S | V | N | Y | G | A | C | Y | P | V | F | N | K |
| ABE7.8 | W | R | L | N | A | | L | N | F | S | V | N | Y | G | N | C | Y | R | V | F | N | K |
| ABE7.9 | W | R | L | N | A | | L | N | F | S | V | N | Y | G | N | C | Y | P | V | F | N | K |
| ABE7.10 | W | R | L | N | A | | L | N | F | S | V | N | Y | G | A | C | Y | P | V | F | N | K |

[0514] In some embodiments, the base editor is an eighth generation ABE (ABE8). In some embodiments, the ABE8 contains a TadA*8 variant. In some embodiments, the ABE8 has a monomeric construct containing a TadA*8 variant (“ABE8.x-m”). In some embodiments, the ABE8 is ABE8.1-m, which has a monomeric construct containing TadA*7.10 with a Y147T mutation (TadA*8.1). In some embodiments, the ABE8 is ABE8.2-m, which has a monomeric construct containing TadA*7.10 with a Y147R mutation (TadA*8.2). In some embodiments, the ABE8 is ABE8.3-m, which has a monomeric construct containing TadA*7.10 with a Q154S mutation (TadA*8.3). In some embodiments, the ABE8 is ABE8.4-m, which has a monomeric construct containing TadA*7.10 with a Y123H mutation (TadA*8.4). In some embodiments, the ABE8 is ABE8.5-m, which has a monomeric construct containing TadA*7.10 with a V82S mutation (TadA*8.5). In some embodiments, the ABE8 is ABE8.6-m, which has a monomeric construct containing TadA*7.10 with a T166R mutation (TadA*8.6). In some embodiments, the ABE8 is ABE8.7-m, which has a monomeric construct containing TadA*7.10 with a Q154R mutation (TadA*8.7). In some embodiments, the ABE8 is ABE8.8-m, which has a monomeric construct containing TadA*7.10 with Y147R, Q154R, and Y123H mutations (TadA*8.8). In some embodiments, the ABE8 is ABE8.9-m, which has a monomeric construct containing TadA*7.10 with Y147R, Q154R and I76Y mutations (TadA*8.9). In some embodiments, the ABE8 is ABE8.10-m, which has a monomeric construct containing TadA*7.10 with Y147R, Q154R, and T166R mutations (TadA*8.10). In some embodiments, the ABE8 is ABE8.11-m, which has a monomeric construct containing TadA*7.10 with Y147T and Q154R mutations (TadA*8.11). In some embodiments, the ABE8 is ABE8.12-m, which has a monomeric construct containing TadA*7.10 with Y147T and Q154S mutations (TadA*8.12).

[0515] In some embodiments, the ABE8 is ABE8.13-m, which has a monomeric construct containing TadA*7.10 with Y123H (Y123H reverted from H123Y), Y147R, Q154R and I76Y mutations (TadA*8.13). In some embodiments, the ABE8 is ABE8.14-m, which has a monomeric construct containing TadA*7.10 with 176Y and V82S mutations (TadA*8.14). In some embodiments, the ABE8 is ABE8.15-m, which has a monomeric construct containing TadA*7.10 with V82S and Y147R mutations (TadA*8.15). In some embodiments, the ABE8 is ABE8.16-m, which has a monomeric construct containing TadA*7.10 with V82S, Y123H (Y123H reverted from H123Y) and Y147R mutations (TadA*8.16). In some embodiments, the ABE8 is ABE8.17-m, which has a monomeric construct containing TadA*7.10 with V82S and Q154R mutations (TadA*8.17). In some embodiments, the ABE8 is ABE8.18-m, which has a monomeric construct containing TadA*7.10 with V82S, Y123H (Y123H reverted from H123Y) and Q154R mutations (TadA*8.18). In some embodiments, the ABE8 is ABE8.19-m, which has a monomeric construct containing TadA*7.10 with V82S, Y123H (Y123H reverted from H123Y), Y147R and Q154R mutations (TadA*8.19). In some embodiments, the ABE8 is ABE8.20-m, which has a monomeric construct containing TadA*7.10 with I76Y, V82S, Y123H (Y123H reverted from H123Y), Y147R and Q154R mutations (TadA*8.20). In some embodiments, the ABE8 is ABE8.21-m, which has a monomeric construct containing TadA*7.10 with Y147R and Q154S mutations (TadA*8.21). In some embodiments, the ABE8 is ABE8.22-m, which has a monomeric construct containing TadA*7.10 with V82S and Q154S mutations (TadA*8.22). In some embodiments, the ABE8 is ABE8.23-m, which has a monomeric construct containing TadA*7.10 with V82S and Y123H (Y123H reverted from H123Y) mutations (TadA*8.23). In some embodiments, the ABE8 is ABE8.24-m, which has a monomeric construct containing TadA*7.10 with V82S, Y123H (Y123H reverted from H123Y), and Y147T mutations (TadA*8.24).

[0516] In some embodiments, the ABE8 has a heterodimeric construct containing wild-type E. coli TadA fused to a TadA*8 variant (“ABE8.x-d”). In some embodiments, the ABE8 is ABE8.1-d, which has a heterodimeric construct containing wild-type E. coli TadA fused to TadA*7.10 with a Y147T mutation (TadA*8.1). In some embodiments, the ABE8 is ABE8.2-d, which has a heterodimeric construct containing wild-type E. coli TadA fused to TadA*7.10 with a Y147R mutation (TadA*8.2). In some embodiments, the ABE8 is ABE8.3-d, which has a heterodimeric construct containing wild-type E. coli TadA fused to TadA*7.10 with a Q154S mutation (TadA*8.3). In some embodiments, the ABE8 is ABE8.4-d, which has a heterodimeric construct containing wild-type E. coli TadA fused to TadA*7.10 with a Y123H mutation (TadA*8.4). In some embodiments, the ABE8 is ABE8.5-d, which has a heterodimeric construct containing wild-type E. coli TadA fused to TadA*7.10 with a V82S mutation (TadA*8.5). In some embodiments, the ABE8 is ABE8.6-d, which has a heterodimeric construct containing wild-type E. coli TadA fused to TadA*7.10 with a T166R mutation (TadA*8.6). In some embodiments, the ABE8 is ABE8.7-d, which has a heterodimeric construct containing wild-type E. coli TadA fused to TadA*7.10 with a Q154R mutation (TadA*8.7). In some embodiments, the ABE8 is ABE8.8-d, which has a heterodimeric construct containing wild-type E. coli TadA fused to TadA*7.10 with Y147R, Q154R, and Y123H mutations (TadA*8.8). In some embodiments, the ABE8 is ABE8.9-d, which has a heterodimeric construct containing wild-type E. coli TadA fused to TadA*7.10 with Y147R, Q154R and 176Y mutations (TadA*8.9). In some embodiments, the ABE8 is ABE8.10-d, which has a heterodimeric construct containing wild-type E. coli TadA fused to TadA*7.10 with Y147R, Q154R, and T166R mutations (TadA*8.10). In some embodiments, the ABE8 is ABE8.11-4, which has a heterodimeric construct containing wild-type E. coli TadA fused to TadA*7.10 with Y147T and Q154R mutations (TadA*8.11). In some embodiments, the ABE8 is ABE8.12-d, which has heterodimeric construct containing wild-type E. coli TadA fused to TadA*7.10 with Y147T and Q154S mutations (TadA*8.12). In some embodiments, the ABE8 is ABE8.13-d, which has a heterodimeric construct containing wild-type E. coli TadA fused to TadA*7.10 with Y123H (Y123H reverted from H123Y), Y147R, Q154R and I76Y mutations (TadA*8.13). In some embodiments, the ABE8 is ABE8.14-d, which has a heterodimeric construct containing wild-type E. coli TadA fused to TadA*7.10 with I76Y and V82S mutations (TadA*8.14). In some embodiments, the ABE8 is ABE8.15-d, which has a heterodimeric construct containing wild-type E. coli TadA fused to TadA*7.10 with V82S and Y147R mutations (TadA*8.15). In some embodiments, the ABE8 is ABE8.16-d, which has a heterodimeric construct containing wild-type E. coli TadA fused to TadA*7.10 with V82S, Y123H (Y123H reverted from H123Y) and Y147R mutations (TadA*8.16). In some embodiments, the ABE8 is ABE8.17-d, which has a heterodimeric construct containing wild-type E. coli TadA fused to TadA*7.10 with V82S and Q154R mutations (TadA*8.17). In some embodiments, the ABE8 is ABE8.18-d, which has a heterodimeric construct containing wild-type E. coli TadA fused to TadA*7.10 with V82S, Y123H (Y123H reverted from H123Y) and Q154R mutations (TadA*8.18). In some embodiments, the ABE8 is ABE8.19-d, which has a heterodimeric construct containing wild-type E. coli TadA fused to TadA*7.10 with V82S, Y123H (Y123H reverted from H123Y), Y147R and Q154R mutations (TadA*8.19). In some embodiments, the ABE8 is ABE8.20-d, which has a heterodimeric construct containing wild-type E. coli TadA fused to TadA*7.10 with 176Y, V82S, Y123H (Y123H reverted from H123Y), Y147R and Q154R mutations (TadA*8.20). In some embodiments, the ABE8 is ABE8.21-d, which has a heterodimeric construct containing wild-type E. coli TadA fused to TadA*7.10 with Y147R and Q154S mutations (TadA*8.21). In some embodiments, the ABE8 is ABE8.22-d, which has a heterodimeric construct containing wild-type E. coli TadA fused to TadA*7.10 with V82S and Q154S mutations (TadA*8.22). In some embodiments, the ABE8 is ABE8.23-d, which has a heterodimeric construct containing wild-type E. coli TadA fused to TadA*7.10 with V82S and Y123H (Y123H reverted from H123Y) mutations (TadA*8.23). In some embodiments, the ABE8 is ABE8.24-d, which has a heterodimeric construct containing wild-type E. coli TadA fused to TadA*7.10 with V82S, Y123H (Y123H reverted from H123Y), and Y147T mutations (TadA*8.24).

[0517] In some embodiments, the ABE8 has a heterodimeric construct containing TadA*7.10 fused to a TadA*8 variant (“ABE8.x-7”). In some embodiments, the ABE8 is ABE8.1-7, which has a heterodimeric construct containing TadA*7.10 fused to TadA*7.10 with a Y147T mutation (TadA*8.1). In some embodiments, the ABE8 is ABE8.2-7, which has a heterodimeric construct containing TadA*7.10 fused to TadA*7.10 with a Y147R mutation (TadA*8.2). In some embodiments, the ABE8 is ABE8.3-7, which has a heterodimeric construct containing TadA*7.10 fused to TadA*7.10 with a Q154S mutation (TadA*8.3). In some embodiments, the ABE8 is ABE8.4-7, which has a heterodimeric construct containing TadA*7.10 fused to TadA*7.10 with a Y123H mutation (TadA*8.4). In some embodiments, the ABE8 is ABE8.5-7, which has a heterodimeric construct containing TadA*7.10 fused to TadA*7.10 with a V82S mutation (TadA*8.5). In some embodiments, the ABE8 is ABE8.6-7, which has a heterodimeric construct containing TadA*7.10 fused to TadA*7.10 with a T166R mutation (TadA*8.6). In some embodiments, the ABE8 is ABE8.7-7, which has a heterodimeric construct containing TadA*7.10 fused to TadA*7.10 with a Q154R mutation (TadA*8.7). In some embodiments, the ABE8 is ABE8.8-7, which has a heterodimeric construct containing TadA*7.10 fused to TadA*7.10 with Y147R, Q154R, and Y123H mutations (TadA*8.8). In some embodiments, the ABE8 is ABE8.9-7, which has a heterodimeric construct containing TadA*7.10 fused to TadA*7.10 with Y147R, Q154R and I76Y mutations (TadA*8.9). In some embodiments, the ABE8 is ABE8.10-7, which has a heterodimeric construct containing TadA*7.10 fused to TadA*7.10 with Y147R, Q154R, and T166R mutations (TadA*8.10). In some embodiments, the ABE8 is ABE8.11-7, which has a heterodimeric construct containing TadA*7.10 fused to TadA*7.10 with Y147T and Q154R mutations (TadA*8.11). In some embodiments, the ABE8 is ABE8.12-7, which has a heterodimeric construct containing TadA*7.10 fused to TadA*7.10 with Y147T and Q154S mutations (TadA*8.12). In some embodiments, the ABE8 is ABE8.13-7, which has a heterodimeric construct containing TadA*7.10 fused to TadA*7.10 with Y123H (Y123H reverted from H123Y), Y147R, Q154R and 176Y mutations (TadA*8.13). In some embodiments, the ABE8 is ABE8.14-7, which has a heterodimeric construct containing TadA*7.10 fused to TadA*7.10 with 176Y and V82S mutations (TadA*8.14). In some embodiments, the ABE8 is ABE8.15-7, which has a heterodimeric construct containing TadA*7.10 fused to TadA*7.10 with V82S and Y147R mutations (TadA*8.15). In some embodiments, the ABE8 is ABE8.16-7, which has a heterodimeric construct containing TadA*7.10 fused to TadA*7.10 with V82S, Y123H (Y123H reverted from H123Y) and Y147R mutations (TadA*8.16). In some embodiments, the ABE8 is ABE8.17-7, which has a heterodimeric construct containing TadA*7.10 fused to TadA*7.10 with V82S and Q154R mutations (TadA*8.17). In some embodiments, the ABE8 is ABE8.18-7, which has a heterodimeric construct containing TadA*7.10 fused to TadA*7.10 with V82S, Y123H (Y123H reverted from H123Y) and Q154R mutations (TadA*8.18). In some embodiments, the ABE8 is ABE8.19-7, which has a heterodimeric construct containing TadA*7.10 fused to TadA*7.10 with V82S, Y123H (Y123H reverted from H123Y), Y147R and Q154R mutations (TadA*8.19). In some embodiments, the ABE8 is ABE8.20-7, which has a heterodimeric construct containing TadA*7.10 fused to TadA*7.10 with I76Y, V82S, Y123H (Y123H reverted from H123Y), Y147R and Q154R mutations (TadA*8.20). In some embodiments, the ABE8 is ABE8.21-7, which has a heterodimeric construct containing TadA*7.10 fused to TadA*7.10 with Y147R and Q154S mutations (TadA*8.21). In some embodiments, the ABE8 is ABE8.22-7, which has a heterodimeric construct containing TadA*7.10 fused to TadA*7.10 with V82S and Q154S mutations (TadA*8.22). In some embodiments, the ABE8 is ABE8.23-7, which has a heterodimeric construct containing TadA*7.10 fused to TadA*7.10 with V82S and Y123H (Y123H reverted from H123Y) mutations (TadA*8.23). In some embodiments, the ABE8 is ABE8.24-7, which has a heterodimeric construct containing TadA*7.10 fused to TadA*7.10 with V82S, Y123H (Y123H reverted from H123Y), and Y147T mutations (TadA*8.24).

[0518] In some embodiments, the ABE is ABE8.1-m, ABE8.2-m, ABE8.3-m, ABE8.4-m, ABE8.5-m, ABE8.6-m, ABE8.7-m, ABE8.8-m, ABE8.9-m, ABE8.10-m, ABE8.11-m, ABE8.12-m, ABE8.13-m, ABE8.14-m, ABE8.15-m, ABE8.16-m, ABE8.17-m, ABE8.18-m, ABE8.19-m, ABE8.20-m, ABE8.21-m, ABE8.22-m, ABE8.23-m, ABE8.24-m, ABE8.1-d, ABE8.2-d, ABE8.3-d, ABE8.4-d, ABE8.5-d, ABE8.6-d, ABE8.7-d, ABE8.8-d, ABE8.9-d, ABE8.10-d, ABE8.11-d, ABE8.12-d, ABE8.13-d, ABE8.14-d, ABE8.15-d, ABE8.16-d, ABE8.17-d, ABE8.18-d, ABE8.19-d, ABE8.20-d, ABE8.21-d, ABE8.22-d, ABE8.23-d, or ABE8.24-d as shown in Table 12 below. In Table 12, “monomer” indicates an ABE comprising a single TadA*7.10 comprising the indicated alterations, and “heterodimer” indicates an ABE comprising a TadA*7.10 comprising the indicated alterations fused to an E. coli TadA adenosine deaminase.

TABLE 12
Adenosine Deaminase Base Editor 8 (ABE8) Variants.

| | Adenosine | |
|---|---|---|
| ABES | Deaminase | Adenosine Deaminase Description |
| ABE8.1-m | TadA*8.1 | Monomer_TadA*7.10 + Y147T |
| ABE8.2-m | TadA*8.2 | Monomer_TadA*7.10 + Y147R |
| ABE8.3-m | TadA*8.3 | Monomer_TadA*7.10 + Q154S |
| ABE8.4-m | TadA*8.4 | Monomer_TadA*7.10 + Y123H |
| ABE8.5-m | TadA*8.5 | Monomer_TadA*7.10 + V82S |
| ABE8.6-m | TadA*8.6 | Monomer_TadA*7.10 + T166R |
| ABE8.7-m | TadA*8.7 | Monomer_TadA*7.10 + Q154R |
| ABE8.8-m | TadA*8.8 | Monomer_TadA*7.10 + Y147R_Q154R_Y123H |
| ABE8.9-m | TadA*8.9 | Monomer_TadA*7.10 + Y147R_Q154R_I76Y |
| ABE8.10-m | TadA*8.10 | Monomer_TadA*7.10 + Y147R_Q154R_T166R |
| ABE8.11-m | TadA*8.11 | Monomer_TadA*7.10 + Y147T_Q154R |
| ABE8.12-m | TadA*8.12 | Monomer_TadA*7.10 + Y147T_Q154S |
| ABE8.13-m | TadA*8.13 | Monomer_TadA*7.10 + |
| | | Y123H_Y147R_Q154R_I76Y |
| ABE8.14-m | TadA*8.14 | Monomer_TadA*7.10 + I76Y_V82S |
| ABE8.15-m | TadA*8.15 | Monomer_TadA*7.10 + V82S_Y147R |
| ABE8.16-m | TadA*8.16 | Monomer_TadA*7.10 + V82S_Y123H_Y147R |
| ABE8.17-m | TadA*8.17 | Monomer_TadA*7.10 + V82S_Q154R |
| ABE8.18-m | TadA*8.18 | Monomer_TadA*7.10 + V82S_Y123H_Q154R |
| ABE8.19-m | TadA*8.19 | Monomer_TadA*7.10 + |
| | | V82S_Y123H_Y147R_Q154R |
| ABE8.20-m | TadA*8.20 | Monomer_TadA*7.10 + |
| | | I76Y_V82S_Y123H_Y147R_Q154R |
| ABE8.21-m | TadA*8.21 | Monomer_TadA*7.10 + Y147R_Q154S |
| ABE8.22-m | TadA*8.22 | Monomer_TadA*7.10 + V82S_Q154S |
| ABE8.23-m | TadA*8.23 | Monomer_TadA*7.10 + V82S_Y123H |
| ABE8.24-m | TadA*8.24 | Monomer_TadA*7.10 + V82S_Y123H_Y147T |
| ABE8.1-d | TadA*8.1 | Heterodimer_(WT) + (TadA*7.10 + Y147T) |
| ABE8.2-d | TadA*8.2 | Heterodimer_(WT) + (TadA*7.10 + Y147R) |
| ABE8.3-d | TadA*8.3 | Heterodimer_(WT) + (TadA*7.10 + Q154S) |
| ABE8.4-d | TadA*8.4 | Heterodimer_(WT) + (TadA*7.10 + Y123H) |
| ABE8.5-d | TadA*8.5 | Heterodimer_(WT) + (TadA*7.10 + V82S) |
| ABE8.6-d | TadA*8.6 | Heterodimer_(WT) + (TadA*7.10 + T166R) |
| ABE8.7-d | TadA*8.7 | Heterodimer_(WT) + (TadA*7.10 + Q154R) |
| ABE8.8-d | TadA*8.8 | Heterodimer_(WT) + (TadA*7.10 + |
| | | Y147R_Q154R_Y123H) |
| ABE8.9-d | TadA*8.9 | Heterodimer_(WT) + (TadA*7.10 + |
| | | Y147R_Q154R_I76Y) |
| ABE8.10-d | TadA*8.10 | Heterodimer_(WT) + (TadA*7.10 + |
| | | Y147R_Q154R_T166R) |
| ABE8.11-d | TadA*8.11 | Heterodimer_(WT) + (TadA*7.10 + Y147T_Q154R) |
| ABE8.12-d | TadA*8.12 | Heterodimer_(WT) + (TadA*7.10 + Y147T_Q154S) |
| ABE8.13-d | TadA*8.13 | Heterodimer_(WT) + (TadA*7.10 + |
| | | Y123H_Y147T_Q154R_I76Y) |
| ABE8.14-d | TadA*8.14 | Heterodimer_(WT) + (TadA*7.10 + I76Y_V82S) |
| ABE8.15-d | TadA*8.15 | Heterodimer_(WT) + (TadA*7.10 + V82S_Y147R) |
| ABE8.16-d | TadA*8.16 | Heterodimer_(WT) + (TadA*7.10 + |
| | | V82S_Y123H_Y147R) |
| ABE8.17-d | TadA*8.17 | Heterodimer_(WT) + (TadA*7.10 + V82S_Q154R) |
| ABE8.18-d | TadA*8.18 | Heterodimer_(WT) + (TadA*7.10 + |
| | | V82S_Y123H_Q154R) |
| ABE8.19-d | TadA*8.19 | Heterodimer_(WT) + (TadA*7.10 + |
| | | V82S_Y123H_Y147R_Q154R) |
| ABE8.20-d | TadA*8.20 | Heterodimer_(WT) + (TadA*7.10 + |
| | | I76Y_V82S_Y123H_Y147R_Q154R) |
| ABE8.21-d | TadA*8.21 | Heterodimer_(WT) + (TadA*7.10 + Y147R_Q154S) |
| ABE8.22-d | TadA*8.22 | Heterodimer_(WT) + (TadA*7.10 + V82S_Q154S) |
| ABE8.23-d | TadA*8.23 | Heterodimer_(WT) + (TadA*7.10 + V82S_Y123H) |
| ABE8.24-d | TadA*8.24 | Heterodimer_(WT) + (TadA*7.10 + |
| | | V82S_Y123H_Y147T) |

[0519] In some embodiments, the ABE8 is ABE8a-m, which has a monomeric construct containing TadA*7.10 with R26C, A109S, T111R, D119N, H122N, Y147D, F149Y, T166I, and D167N mutations (TadA*8a). In some embodiments, the ABE8 is ABE8b-m, which has a monomeric construct containing TadA*7.10 with V88A, A109S, T111R, D119N, H122N, F149Y, T166I, and D167N mutations (TadA*8b). In some embodiments, the ABE8 is ABE8c-m, which has a monomeric construct containing TadA*7.10 with R26C, A109S, T111R, D119N, H122N, F149Y, T166I, and D167N mutations (TadA*8c). In some embodiments, the ABE8 is ABE8d-m, which has a monomeric construct containing TadA*7.10 with V88A, T111R, D119N, and F149Y mutations (TadA*8d). In some embodiments, the ABE8 is ABE8e-m, which has a monomeric construct containing TadA*7.10 with A109S, T111R, D119N, H122N, Y147D, F149Y, T166I, and D167N mutations (TadA*8e).

[0520] In some embodiments, the ABE8 is ABE8a-d, which has a heterodimeric construct containing wild-type E. coli TadA fused to TadA*7.10 with R26C, A109S, T111R, D119, H122N, Y147D, F149Y, T166I, and D167N mutations (TadA*8a). In some embodiments, the ABE8 is ABE8b-d, which has a heterodimeric construct containing wild-type E. coli TadA fused to TadA*7.10 with V88A, A109S, T111R, D119N, H122N, F149Y, T166I, and D167N mutations (TadA*8b). In some embodiments, the ABE8 is ABE8c-d, which has a heterodimeric construct containing wild-type E. coli TadA fused to TadA*7.10 with R26C, A109S, T111R, D119N, H122N, F149Y, T166I, and D167N mutations (TadA*8c). In some embodiments, the ABE8 is ABE8d-d, which has a heterodimeric construct containing wild-type E. coli TadA fused to TadA*7.10 with V88A, T111R, D119N, and F149Y mutations (TadA*8d). In some embodiments, the ABE8 is ABE8e-d, which has a heterodimeric construct containing wild-type E. coli TadA fused to TadA*7.10 with A109S, T111R, D119N, H122N, Y147D, F149Y, T166I, and D167N mutations (TadA*8e).

[0521] In some embodiments, the ABE8 is ABE8a-7, which has a heterodimeric construct containing TadA*7.10 fused to TadA*7.10 with R26C, A109S, T111R, D119, H122N, Y147D, F149Y, T166I, and D167N mutations (TadA*8a). In some embodiments, the ABE8 is ABE8b-7, which has a heterodimeric construct containing TadA*7.10 fused to TadA*7.10 with V88A, A109S, T111R, D119N, H122N, F149Y, T166I, and D167N mutations (TadA*8b). In some embodiments, the ABE8 is ABE8c-7, which has a heterodimeric construct containing TadA*7.10 fused to TadA*7.10 with R26C, A109S, T111R, D119N, H122N, F149Y, T166I, and D167N mutations (TadA*8c). In some embodiments, the ABE8 is ABE8d-7, which has a heterodimeric construct containing TadA*7.10 fused to TadA*7.10 with V88A, T111R, D119N, and F149Y mutations (TadA*8d). In some embodiments, the ABE8 is ABE8e-7, which has a heterodimeric construct containing TadA*7.10 fused to TadA*7.10 with A109S, T111R, D119N, H122N, Y147D, F149Y, T166I, and D167N mutations (TadA*8e). In some embodiments, the ABE is ABE8a-m, ABE8b-m, ABE8c-m, ABE8d-m, ABE8e-m, ABE8a-d, ABE8b-d, ABE8c-d, ABE8d-d, or ABE8e-d, as shown in Table 13 below. In some embodiments, the ABE is ABE8e-m or ABE8e-d. ABE8e shows efficient adenine base editing activity and low indel formation when used with Cas homologues other than SpCas9, for example, SaCas9, SaCas9-KKH, Cas12a homologues, e.g., LbCas12a, enAs-Cas12a, SpCas9-NG and circularly permuted CP1028-SpCas9 and CP1041-SpCas9. In addition to the mutations shown for ABE8e in Table 13, off-target RNA and DNA editing were reduced by introducing a V106W substitution into the TadA domain (as described in M. Richter et al., 2020, Nature Biotechnology, doi.org/10.1038/s41587-020-0453-z, the entire contents of which are incorporated by reference herein).

TABLE 13
Additional Adenosine Deaminase Base Editor 8 Variants

| ABE8 Base | Adenosine | |
|---|---|---|
| Editor | Deaminase | Adenosine Deaminase Description |
| ABE8a-m | TadA*8a | Monomer_TadA*7.10 + R26C + A109S + T111R + D119N + |
| | | H122N + Y147D + F149Y + T166I + D167N |
| ABE8b-m | TadA*8b | Monomer_TadA*7.10 + V88A + A109S + T111R + D119N + |
| | | H122N + F149Y + T166I + D167N |
| ABE8c-m | TadA*8c | Monomer_TadA*7.10 + R26C + A109S + T111R + D119N + |
| | | H122N + F149Y + T166I + D167N |
| ABE8d-m | TadA*8d | Monomer_TadA*7.10 + V88A + T111R + D119N + F149Y |
| ABE8e-m | TadA*8e | Monomer_TadA*7.10 + A109S + T111R + D119N + H122N + |
| | | Y147D + F149Y + T166I + D167N |
| ABE8a-d | TadA*8a | Heterodimer_(WT) + (TadA*7.10 + R26C + A109S + T111R + |
| | | D119N + H122N + Y147D + F149Y + T166I + D167N) |
| ABE8b-d | TadA*8b | Heterodimer_(WT) + (TadA*7.10 + V88A + A109S + T111R + |
| | | D119N + H122N + F149Y + T166I + D167N) |
| ABE8c-d | TadA*8c | Heterodimer_(WT) + (TadA*7.10 + R26C + A109S + T111R + |
| | | D119N + H122N + F149Y + T166I + D167N) |
| ABE8d-d | TadA*8d | Heterodimer_(WT) + (TadA*7.10 + V88A + T111R + D119N + |
| | | F149Y) |
| ABE8e-d | TadA*8e | Heterodimer_(WT) + (TadA*7.10 + A109S + T111R + D119N + |
| | | H122N + Y147D + F149Y + T166I + D167N) |

[0522] In some embodiments, base editors (e.g., ABE8) are generated by cloning an adenosine deaminase variant (e.g., TadA*8) into a scaffold that includes a circular permutant Cas9 (e.g., CP5 or CP6) and a bipartite nuclear localization sequence. In some embodiments, the base editor (e.g., ABE7.9, ABE7.10, or ABE8) is an NGC PAM CP5 variant (S. pyogenes Cas9 or spVRQR Cas9). In some embodiments, the base editor (e.g., ABE7.9, ABE7.10, or ABE8) is an AGA PAM CP5 variant (S. pyogenes Cas9 or spVRQR Cas9). In some embodiments, the base editor (e.g., ABE7.9, ABET 10, or ABE8) is an NGC PAM CP6 variant (S. pyogenes Cas9 or spVRQR Cas9). In some embodiments, the base editor (e.g. ABE7.9, ABET 10, or ABE8) is an AGA PAM CP6 variant (S. pyogenes Cas9 or spVRQR Cas9).

[0523] In some embodiments, the ABE has a genotype as shown in Table 14 below.

TABLE 14
Genotypes of ABEs

| | 23 | 26 | 36 | 37 | 48 | 49 | 51 | 72 | 84 | 87 | 105 | 108 | 123 | 125 | 142 | 145 | 147 | 152 | 155 | 156 | 157 | 161 |
|---|---|---|---|---|---|---|---|---|---|---|---|---|---|---|---|---|---|---|---|---|---|---|
| ABE7.9 | L | R | L | N | A | | L | N | F | S | V | N | Y | G | N | C | Y | P | V | F | N | K |
| ABE7.10 | R | R | L | N | A | | L | N | F | S | V | N | Y | G | A | C | Y | P | V | F | N | K |

As shown in Table 15 below, genotypes of 40 ABE8s are described. Residue positions in the evolved E. coli TadA portion of ABE are indicated. Mutational changes in ABE8 are shown when distinct from ABE7.10 mutations. In some embodiments, the ABE has a genotype of one of the ABEs as shown in Table 15 below.

TABLE 15
Residue Identity in Evolved TadA

| | 23 | 36 | 48 | 51 | 76 | 82 | 84 | 106 | 108 | 123 | 146 | 147 | 152 | 154 | 155 | 156 | 157 | 166 |
|---|---|---|---|---|---|---|---|---|---|---|---|---|---|---|---|---|---|---|
| ABE7.10 | R | L | A | L | I | V | F | V | N | Y | C | Y | P | Q | V | F | N | T |
| ABE8.1-m | | | | | | | | | | | | T | | | | | | |
| ABE8.2-m | | | | | | | | | | | | R | | | | | | |
| ABE8.3-m | | | | | | | | | | | | | | S | | | | |
| ABE8.4-m | | | | | | | | | | H | | | | | | | | |
| ABE8.5-m | | | | | | S | | | | | | | | | | | | |
| ABE8.6-m | | | | | | | | | | | | | | | | | | R |
| ABE8.7-m | | | | | | | | | | | | | | R | | | | |
| ABE8.8-m | | | | | | | | | | H | | R | | R | | | | |
| ABE8.9-m | | | | | Y | | | | | | | R | | R | | | | |
| ABE8.10-m | | | | | | | | | | | | R | | R | | | | R |
| ABE8.11-m | | | | | | | | | | | | T | | R | | | | |
| ABE8.12-m | | | | | | | | | | | | T | | S | | | | |
| ABE8.13-m | | | | | Y | | | | | H | | R | | R | | | | |
| ABE8.14-m | | | | | Y | S | | | | | | | | | | | | |
| ABE8.15-m | | | | | | S | | | | | | R | | | | | | |
| ABE8.16-m | | | | | | S | | | | H | | R | | | | | | |
| ABE8.17-m | | | | | | S | | | | | | | | R | | | | |
| ABE8.18-m | | | | | | S | | | | H | | | | R | | | | |
| ABES.19-m | | | | | | S | | | | H | | R | | R | | | | |
| ABE8.20-m | | | | | Y | S | | | | H | | R | | R | | | | |
| ABE8.21-m | | | | | | | | | | | | R | | S | | | | |
| ABE8.22-m | | | | | | S | | | | | | | | S | | | | |
| ABE8.23-m | | | | | | S | | | | H | | | | | | | | |
| ABE8.24-m | | | | | | S | | | | H | | T | | | | | | |
| ABE8.1-d | | | | | | | | | | | | T | | | | | | |
| ABE8.2-d | | | | | | | | | | | | R | | | | | | |
| ABE8.3-d | | | | | | | | | | | | | | S | | | | |
| ABE8.4-d | | | | | | | | | | H | | | | | | | | |
| ABI8,5-d | | | | | | S | | | | | | | | | | | | |
| ABE8.6-d | | | | | | | | | | | | | | | | | | R |
| ABE8.7-d | | | | | | | | | | | | | | R | | | | |
| ABE8.8-d | | | | | | | | | | H | | R | | R | | | | |
| ABE8.9-d | | | | | Y | | | | | | | R | | R | | | | |
| ABE8.10-d | | | | | | | | | | | | R | | R | | | | R |
| ABE8.11-d | | | | | | | | | | | | T | | R | | | | |
| ABE8.12-d | | | | | | | | | | | | T | | S | | | | |
| ABE8.13-d | | | | | Y | | | | | H | | R | | R | | | | |
| ABE8.14-d | | | | | Y | S | | | | | | | | | | | | |
| ABE8.15-d | | | | | | S | | | | | | R | | | | | | |
| ABE8.16-d | | | | | | S | | | | H | | R | | | | | | |
| ABE8.17-d | | | | | | S | | | | | | | | R | | | | |
| ABE8.18-d | | | | | | S | | | | H | | | | R | | | | |
| ABE8.19-d | | | | | | S | | | | H | | R | | R | | | | |
| ABE8.20-d | | | | | Y | S | | | | H | | R | | R | | | | |
| ABE8.21-d | | | | | | | | | | | | R | | S | | | | |
| ABE8.22-d | | | | | | S | | | | | | | | S | | | | |
| ABE8.23-d | | | | | | S | | | | H | | | | | | | | |
| ABE8.24-d | | | | | | S | | | | H | | T | | | | | | |

[0524] In some embodiments, the base editor is ABE8.1, which comprises or consists essentially of the following sequence or a fragment thereof having adenosirne deaminase activity:

ABE8.1 Y147T CP5 NGC PAM_monomer
(SEQ ID NO: 256)
MSEVEFSHEYWMRHALTLAKRARDEREVPVGAVLVLNNRVIGEGWNRAIGLHD
PTAHAEIMALRQGGLVMQNYRLIDATLYVTFEPCVMCAGAMIHSRIGRVVFGVR
NAKTGAAGSLMDVLHYPGMNHRVEITEGILADECAALLCTFFRMPRQVFNAQK
KAQSSTD [symbol] EIGKATAKYFFYSNIM
NFFKTEITLANGEIRKRPLIETNGETGEIVWDKGRDFATVRKVLSMPQVNIV
KKTEVQTGGFSKESILPKRNSDKLIARKKDWDPKKYGGFMQPTVAYSVLVV
AKVEKGKSKKLKSVKELLGITIMERSSFEKNPIDFLEAKGYKEVKKDLIIKLP
KYSLFELENGRKRMLASAKFLQKGNELALPSKYVNFLYLASHYEKLKGSPE
DNEQKQLFVEQHKHYLDEIIEQISEFSKRVILADANLDKVLSAYNKHIRDKPIR
EQAENIIHLFTLTNLGAPRAFKYFDTTIARKEYRSTKEVLDATLIHQSITGLYE
TRIDLSQLGGD [symbol] MDKKYSIGLAIGTNSVGWAVIT
DEYKVPSKKFKVLGNTDRHSIKKNLIGALLFDSGETAEATRLKRTARRRYTR
RKNRICYLQEIFSNEMAKVDDSFFHRLEESFLVEEDKKHERHPIFGNIVDEVA
YHEKYPTIYHLRKKLVDSTDKADLRLIYLALAHMIKFRGHFLIEGDLNPDNS
DVDKLFIQLVQTYNQLFEENPINASGVDAKAILSARLSKSRRLENLIAQLPGE
KKNGLFGNLIALSLGLTPNFKSNFDLAEDAKLQLSKDTYDDDLDNLLAQIGD
QYADLFLAAKNLSDAILLSDILRVNTEITKAPLSASMIKRYDEHHQDLTLLKA
LVRQQLPEKYKEIFFDQSKNGYAGYIDGGASQEEFYKFIKPILEKMDGTEEL
LVKLNREDLLRKQRTFDNGSIPHQIHLGELHAILRRQEDFYPFLKDNREKIE
KILTFRIPYYVGPLARGNSRFAWMTRKSEETITPWNFEEVVDKGASAQSFIER
MTNFDKNLPNEKVLPKHSLLYEYFTVYNELTKVKYVTEGMRKPAFLSGEQK
KAIVDLLFKTNRKVTVKQLKEDYFKKTIECFDSVEISGVEDRFNASLGTYHDL
LKIIKDKDFLDNEENEDILEDIVLTLTLFEDREMIEERLKTYAHLFDDKVMK
QLKRRRYTGWGRLSRKLINGIRDKQSGKTILDFLKSDGFANRNFMQLIHDDS
LTFKEDIQKAQVSGQGDSLHEHIANLAGSPAIKKGILQTVKVVDELVKVMG
RHKPENIVIEMARENQTTQKGQKNSRERMKRIEEGIKELGSQILKEHPVENT
QLQNEKLYLYYLQNGRDMYVDQELDINRLSDYDVDHIVPQSFLKDDSIDNK
VLTRSDKNRGKSDNVPSEEVVKKMKNYWRQLLNAKLITQRKFDNLTKAER
GGLSELDKAGFIKRQLVETRQITKHVAQILDSRMNTKYDENDKLIREVKVIT
LKSKLVSDFRKDFQFYKVREINNYHHAHDAYLNAVVGTALIKKYPKLESEFV
YGDYKVYDVRKMIAKSEQEGADKRTADGSEFESPKKKRKV.

[0525] In the above sequence, the plain text denotes an adenosine deaminase sequence, bold sequence indicates sequence derived from Cas9, the italicized sequence denotes a linker sequence, and the underlined sequence denotes a bipartite nuclear localization sequence. Other ABE8 sequences are provided in the attached sequence listing (SEQ ID NOs: 257-279).

[0526] In some embodiments, the base editor is a ninth generation ABE (ABE9). In some embodiments, the ABE9 contains a TadA*9 variant. ABE9 base editors include an adenosine deaminase variant comprising an amino acid sequence, which contains alterations relative to an ABE 7*10 reference sequence, as described herein. Exemplary ABE9 variants are listed in Table 16. Details of ABE9 base editors are described in International PCT Application No. PCT/2020V049975, which is incorporated herein by reference for its entirety. In Table 16, “monomer” indicates an ABE comprising a single TadA*7.10 comprising the indicated alterations and “heterodimer” indicates an ABE comprising a TadA*7.10 comprising the indicated alterations fused to an E. coli TadA adenosine deaminase.

TABLE 16
Adenosine Deaminase Base Editor 9 (ABE9) Variants.

| ABE9 Description | Alterations |
|---|---|
| ABE9.1_monomer | E25F, V82S, Y123H, T133K, Y147R, Q154R |
| ABE9.2_monomer | E25F, V82S, Y123H, Y147R, Q154R |
| ABE9.3_monomer | V82S, Y123H, P124W, Y147R, Q154R |
| ABE9.4_monomer | L51W, V82S, Y123H, C146R, Y147R, Q154R |
| ABE9.5_monomer | P54C, V82S, Y123H, Y147R, Q154R |
| ABE9.6_monomer | Y73S, V82S, Y123H, Y147R, Q154R |
| ABE9.7_monomer | N38G, V82T, Y123H, Y147R, Q154R |
| ABE9.8_monomer | R23H, V82S, Y123H, Y147R, Q154R |
| ABE9.9_monomer | R21N, V82S, Y123H, Y147R, Q154R |
| ABE9.10_monomer | V82S, Y123H, Y147R, Q154R, A158K |
| ABE9.11_monomer | N72K, V82S, Y123H, D139L, Y147R, |
| | Q154R, |
| ABE9.12_monomer | E25F, V82S, Y123H, D139M, Y147R, Q154R |
| ABE9.13_monomer | M70V, V82S, M94V, Y123H, Y147R, Q154R |
| ABE9.14_monomer | Q71M, V82S, Y123H, Y147R, Q154R |
| ABE9.15_heterodimer | E25F, V82S, Y123H, T133K, Y147R, Q154R |
| ABE9.16_heterodimer | E25F, V82S, Y123H, Y147R, Q154R |
| ABE9.17_heterodimer | V82S, Y123H, P124W, Y147R, Q154R |
| ABE9.18_heterodimer | L51W, V82S, Y123H, C146R, Y147R, Q154R |
| ABE9.19_heterodimer | P54C, V82S, Y123H, Y147R, Q154R |
| ABE9.2_heterodimer | Y73S, V82S, Y123H, Y147R, Q154R |
| ABE9.21_heterodimer | N38G, V82T, Y123H, Y147R, Q154R |
| ABE9.22_heterodimer | R23H, V82S, Y123H, Y147R, Q154R |
| ABE9.23_heterodimer | R21N, V82S, Y123H, Y147R, Q154R |
| ABE9.24_heterodimer | V82S, Y123H, Y147R, Q154R, A158K |
| ABE9.25_heterodimer | N72K, V82S, Y123H, D139L, Y147R, |
| | Q154R, |
| ABE9.26_heterodimer | E25F, V82S, Y123H, D139M, Y147R, Q154R |
| ABE9.27_heterodimer | M70V, V82S, M94V, Y123H, Y147R, Q154R |
| ABE9.28_heterodimer | Q71M, V82S, Y123H, Y147R, Q154R |
| ABE9.29_monomer | E25F_I76Y_V82S_Y123H_Y147R_Q154R |
| ABE9.30_monomer | I76Y_V82T_Y123H_Y147R_Q154R |
| ABE9.31_monomer | N38G_I76Y_V82S_Y123H_Y147R_Q154R |
| ABE9.32_monomer | N38G_I76Y_V82T_Y123H_Y147R_Q154R |
| ABE9.33_monomer | R23H_I76Y_V82S_Y123H_Y147R_Q154R |
| ABE9.34_monomer | P54C_I76Y_V82S_Y123H_Y147R_Q154R |
| ABE9.35_monomer | R21N_I76Y_V82S_Y123H_Y147R_Q154R |
| ABE9.36_monomer | I76Y_V82S_Y123H_D138M_Y147R_Q154R |
| ABE9.37_monomer | Y72S_I76Y_V82S_Y123H_Y147R_Q154R |
| ABE9.38_heterodimer | E25F_I76Y_V82S_Y123H_Y147R_Q154R |
| ABE9.39_heterodimer | I76Y_V82T_Y123H_Y147R_Q154R |
| ABE9.40_heterodimer | N38G_I76Y_V82S_Y123H_Y147R_Q154R |
| ABE9.41_heterodimer | N38G_I76Y_V82T_Y123H_Y147R_Q154R |
| ABE9.42_heterodimer | R23H_I76Y_V82S_Y123H_Y147R_Q154R |
| ABE9.43_heterodimer | P54C_I76Y_V82S_Y123H_Y147R_Q154R |
| ABE9.44_heterodimer | R21N_I76Y_V82S_Y123H_Y147R_Q154R |
| ABE9.45_heterodimer | I76Y_V82S_Y123H_D138M_Y147R_Q154R |
| ABE9.46_heterodimer | Y72S_I76Y_V82S_Y123H_Y147R_Q154R |
| ABE9.47_monomer | N72K_V82S, Y123H, Y147R, Q154R |
| ABE9.48_monomer | Q71M_V82S, Y123H, Y147R, Q154R |
| ABE9.49_monomer | M70V, V82S, M94V, Y123H, Y147R, Q154R |
| ABE9.50_monomer | V82S, Y123H, T133K, Y147R, Q154R |
| ABE9.51_monomer | V82S, Y123H, T133K, Y147R, Q154R, |
| | A158K |
| ABE9.52_monomer | M70V, Q71M, N72K, V82S, Y123H, Y147R, |
| | Q154R |
| ABE9.53_heterodimer | N72K_V82S, Y123H, Y147R, Q154R |
| ABE9.54_heterodimer | Q71M_V82S, Y123H, Y147R, Q154R |
| ABE9.55_heterodimer | M70V, V82S, M94V, Y123H, Y147R, Q154R |
| ABE9.56_heterodimer | V82S, Y123H, T133K, Y147R, Q154R |
| ABE9.57_heterodimer | V82S, Y123H, T133K, Y147R, Q154R, |
| | A158K |
| ABE9.58_heterodimer | M70V, Q71M, N72K, V82S, Y123H, Y147R, |
| | Q154R |

[0527] In some embodiments, the base editor comprises a domain comprising all or a portion of a uracil glycosylase inhibitor (UGI). In some embodiments, the base editor comprises a domain comprising all or a portion of a nucleic acid polymerase. In some embodiments, a base editor can comprise as a domain all or a portion of a nucleic acid polymerase (NAP). For example, a base editor can comprise all or a portion of a eukaryotic NAP. In some embodiments, a NAP or portion thereof incorporated into a base editor is a DNA polymerase. In some embodiments, a NAP or portion thereof incorporated into a base editor has translesion polymerase activity. In some embodiments, a NAP or portion thereof incorporated into a base editor is a translesion DNA polymerase. In some embodiments, a NAP or portion thereof incorporated into a base editor is a Rev7, Rev1 complex, polymerase iota, polymerase kappa, or polymerase eta. In some embodiments, a NAP or portion thereof incorporated into a base editor is a eukaryotic polymerase alpha, beta, gamma, delta, epsilon, gamma, eta, iota, kappa, lambda, mu, or nu component. In some embodiments, a NAP or portion thereof incorporated into a base editor comprises an amino acid sequence that is at least 75%, 80%, 85%, 90%, 95%, 96%, 97%, 98%, 99%, or 99.5% identical to a nucleic acid polymerase (e.g., a translesion DNA polymerase). In some embodiments, a nucleic acid polymerase or portion thereof incorporated into a base editor is a translesion DNA polymerase.

[0528] In some embodiments, a domain of the base editor can comprise multiple domains. For example, the base editor comprising a polynucleotide programmable nucleotide binding domain derived from Cas9 can comprise a REC lobe and an NUC lobe corresponding to the REC lobe and NUC lobe of a wild-type or natural Cas9. Structurally, Cas9 includes two lobes, an α-helical recognition lobe (REC) and a nuclease lobe (NUC). REC is comprised of three α-helical domains (REC1 and REC2) and has no structural similarity to any other known protein. REC1 forms an elongated, alpha-helical structure comprising 25 alpha helices and two beta-sheets; REC2 inserted within REC1 adopts a six-helix bundle structure. The NUC lobe includes the nuclease domains RuvCs, HNH, and the C-terminal domain (CTD). The REC lobe and the NUC lobe of Cas9 fold to present a positively charged groove at their interface which accommodates the negatively charged sgRNA:target DNA heteroduplex (Nishimasu H. et al., 2014, Cell 156:935-49; Jiang, F. et al., 2017, Ann. Rev. Biophysics, 46(1):505-529). An sgRNA-DNA complex is bound at the interface between the two lobes.

[0529] In another example, the base editor can comprise one or more of a RuvCI domain, BH domain (bridge helix domain which connects the REC and NUC lobes), REC1 domain, REC2 domain, RuvCII domain, L1 domain, HNH domain, L2 domain, RuvCIII domain, WED domain, TOPO domain or CTD domain. In some embodiments, one or more domains of the base editor comprise a mutation (e.g., substitution, insertion, deletion) relative to a wild-type version of a polypeptide comprising the domain. For example, an HNH domain of a polynucleotide programmable DNA binding domain can comprise an H840A substitution. In another example, a RuvCI domain of a polynucleotide programmable DNA binding domain can comprise a D10A substitution.

[0530] Different domains (e.g., adjacent domains) of the base editor disclosed herein can be connected to each other with or without the use of one or more linker domains (e.g., an XTEN linker domain). In some embodiments, a linker domain can be a bond (e.g., covalent bond), chemical group, or a molecule linking two molecules or moieties, e.g., two domains of a fusion protein, such as, for example, a first domain (e.g., Cas9-derived domain) and a second domain (e.g., an adenosine deaminase domain or a cytidine deaminase domain). In some embodiments, a linker is a covalent bond (e.g., a carbon-carbon bond, disulfide bond, carbon-hetero atom bond, etc.). In certain embodiments, a linker is a carbon nitrogen bond of an amide linkage. In certain embodiments, a linker is a cyclic or acyclic, substituted or unsubstituted, branched or unbranched aliphatic or heteroaliphatic linker. In certain embodiments, a linker is polymeric (e.g., polyethylene, polyethylene glycol, polyamide, polyester, etc.). In certain embodiments, a linker comprises a monomer, dimer, or polymer of aminoalkanoic acid. In some embodiments, a linker comprises an aminoalkanoic acid (e.g., glycine, ethanoic acid, alanine, beta-alanine, 3-aminopropanoic acid, 4-aminobutanoic acid, 5-pentanoic acid, etc.). In some embodiments, a linker comprises a monomer, dimer, or polymer of aminohexanoic acid (Ahx). In certain embodiments, a linker is based on a carbocyclic moiety (e.g., cyclopentane, cyclohexane). In other embodiments, a linker comprises a polyethylene glycol moiety (PEG). In certain embodiments, a linker comprises an aryl or heteroaryl moiety. In certain embodiments, the linker is based on a phenyl ring. A linker can include functionalized moieties to facilitate attachment of a nucleophile (e.g., thiol, amino) from the peptide to the linker. Any electrophile can be used as part of the linker. Exemplary electrophiles include, but are not limited to, activated esters, activated amides, Michael acceptors, alkyl halides, aryl halides, acyl halides, and isothiocyanates. In some embodiments, a linker joins a gRNA binding domain of an RNA-programmable nuclease, including a Cas9 nuclease domain, and the catalytic domain of a nucleic acid editing protein. In some embodiments, a linker joins a dCas9 and a second domain (e.g., UGI, etc.).

### Linkers

[0531] In certain embodiments, linkers may be used to link any of the peptides or peptide domains of the invention. The linker may be as simple as a covalent bond, or it may be a polymeric linker many atoms in length. In certain embodiments, the linker is a polypeptide or based on amino acids. In other embodiments, the linker is not peptide-like. In certain embodiments, the linker is a covalent bond (e.g., a carbon-carbon bond, disulfide bond, carbon-heteroatom bond, etc.). In certain embodiments, the linker is a carbon-nitrogen bond of an amide linkage. In certain embodiments, the linker is a cyclic or acyclic, substituted or unsubstituted, branched or unbranched aliphatic or heteroaliphatic linker. In certain embodiments, the linker is polymeric (e.g., polyethylene, polyethylene glycol, polyamide, polyester, etc.). In certain embodiments, the linker comprises a monomer, dimer, or polymer of aminoalkanoic acid. In certain embodiments, the linker comprises an aminoalkanoic acid (e.g., glycine, ethanoic acid, alanine, beta-alanine, 3-aminopropanoic acid, 4-aminobutanoic acid, 5-pentanoic acid, etc.). In certain embodiments, the linker comprises a monomer, dimer, or polymer of aminohexanoic acid (Ahx). In certain embodiments, the linker is based on a carbocyclic moiety (e.g., cyclopentane, cyclohexane). In other embodiments, the linker comprises a polyethylene glycol moiety (PEG). In other embodiments, the linker comprises amino acids. In certain embodiments, the linker comprises a peptide. In certain embodiments, the linker comprises an aryl or heteroaryl moiety. In certain embodiments, the linker is based on a phenyl ring. The linker may include functionalized moieties to facilitate attachment of a nucleophile (e.g., thiol, amino) from the peptide to the linker. Any electrophile may be used as part of the linker. Exemplary electrophiles include, but are not limited to, activated esters, activated amides, Michael acceptors, alkyl halides, aryl halides, acyl halides, and isothiocyanates.

[0532] Typically, a linker is positioned between, or flanked by, two groups, molecules, or other moieties and connected to each one via a covalent bond, thus connecting the two. In some embodiments, a linker is an amino acid or a plurality of amino acids (e.g., a peptide or protein). In some embodiments, a linker is an organic molecule, group, polymer, or chemical moiety. In some embodiments, a linker is 2-100 amino acids in length, for example, 2, 3, 4, 5, 6, 7, 8, 9, 10, 11, 12, 13, 14, 15, 16, 17, 18, 19, 20, 21, 22, 23, 24, 25, 26, 27, 28, 29, 30, 30-35, 35-40, 40-45, 45-50, 50-60, 60-70, 70-80, 80-90, 90-100, 100-150, or 150-200 amino acids in length. In some embodiments, the linker is about 3 to about 104 (e.g., 5, 6, 7, 8, 9, 10, 11, 12, 13, 14, 15, 16, 17, 18, 19, 20, 21, 22, 23, 24, 25, 26, 27, 28, 29, 30, 31, 32, 33, 34, 35, 36, 37, 38, 39, 40, 41, 42, 43, 44, 45, 46, 47, 48, 49, 50, 55, 60, 65, 70, 75, 80, 85, 90, 95, or 100) amino acids in length. Longer or shorter linkers are also contemplated.

[0533] In some embodiments, any of the fusion proteins provided herein, comprise a cytidine or adenosine deaminase and a Cas9 domain that are fused to each other via a linker. Various linker lengths and flexibilities between the cytidine or adenosine deaminase and the Cas9 domain can be employed (e.g., ranging from very flexible linkers of the form (GGGS)n (SEQ ID NO: 171), (GGGGS)n (SEQ ID NO: 172), and (G)n to more rigid linkers of the form (EAAAK)n (SEQ ID NO: 173), (SGGS)n (SEQ ID NO: 280), SGSETPGTSESATPES (SEQ ID NO: 174) (see, e.g., Guilinger J P, et al. Fusion of catalytically inactive Cas9 to FokI nuclease improves the specificity of genome modification. Nat. Biotechnol. 2014; 32(6): 577-82; the entire contents are incorporated herein by reference) and (XP)n) in order to achieve the optimal length for activity for the cytidine or adenosine deaminase nucleobase editor. In some embodiments, n is 1, 2, 3, 4, 5, 6, 7, 8, 9, 10, 11, 12, 13, 14, or 15. In some embodiments, the linker comprises a (GGS)n motif, wherein n is 1, 3, or 7. In some embodiments, cytidine deaminase or adenosine deaminase and the Cas9 domain of any of the fusion proteins provided herein are fused via a linker comprising the amino acid sequence SGSETPGTSESATPES (SEQ ID NO: 174), which can also be referred to as the XTEN linker. In some embodiments, a linker comprises a plurality of proline residues and is 5-21, 5-14, 5-9, 5-7 amino acids in length, e.g., PAPAP (SEQ ID NO: 281), PAPAPA (SEQ ID NO: 282), PAPAPAP (SEQ ID NO: 283), PAPAPAPA (SEQ ID NO: 284), P(AP)4 (SEQ ID NO: 285), P(AP)7 (SEQ ID NO: 286), P(AP)10 (SEQ ID NO: 287) (see, e.g., Tan J, Zhang F, Karcher D, Bock R. Engineering of high-precision base editors for site-specific single nucleotide replacement. Nat Commun. 2019 Jan. 25; 10(1):439; the entire contents are incorporated herein by reference). Such proline-rich linkers are also termed “rigid” linkers.

[0534] In another embodiment, the base editor system comprises a component (protein) that interacts non-covalently with a deaminase (DNA deaminase), e.g., an adenosine or a cytidine deaminase, and transiently attracts the adenosine or cytidine deaminase to the target nucleobase in a target polynucleotide sequence for specific editing, with minimal or reduced bystander or target-adjacent effects. Such a non-covalent system and method involving deaminase-interacting proteins serves to attract a DNA deaminase to a particular genomic target nucleobase and decouples the events of on-target and target-adjacent editing, thus enhancing the achievement of more precise single base substitution mutations. In an embodiment, the deaminase-interacting protein binds to the deaminase (e.g., adenosine deaminase or cytidine deaminase) without blocking or interfering with the active (catalytic) site of the deaminase from engaging the target nucleobase (e.g., adenosine or cytidine, respectively). Such as system, termed “MagnEdit,” involves interacting proteins tethered to a Cas9 and gRNA complex and can attract a co-expressed adenosine or cytidine deaminase (either exogenous or endogenous) to edit a specific genomic target site, and is described in McCann, J. et al., 2020, “MagnEdit—interacting factors that recruit DNA-editing enzymes to single base targets,” Life-Science-Alliance, Vol. 3, No. 4 (e201900606), (doi 10.26508/Isa.201900606), the contents of which are incorporated by reference herein in their entirety. In an embodiment, the DNA deaminase is an adenosine deaminase variant (e.g., TadA*8) as described herein.

[0535] In another embodiment, a system called “Suntag,” involves non-covalently interacting components used for recruiting protein (e.g., adenosine deaminase or cytidine deaminase) components, or multiple copies thereof, of base editors to polynucleotide target sites to achieve base editing at the site with reduced adjacent target editing, for example, as described in Tanenbaum, M. E. et al., “A protein tagging system for signal amplification in gene expression and fluorescence imaging,” Cell. 2014 Oct. 23; 159(3): 635-646. doi:10.1016/j.cell.2014.09.039; and in Huang, Y.-H. et al., 2017, “DNA epigenome editing using CRISPR-Cas SunTag-directed DNMT3A,” Genome Biol 18: 176. doi:10.1186/s13059-017-1306-z, the contents of each of which are incorporated by reference herein in their entirety. In an embodiment, the DNA deaminase is an adenosine deaminase variant (e.g., TadA*8) as described herein.

Nucleic Acid Programmable DNA Binding Proteins with Guide RNAs

[0536] Provided herein are compositions and methods for base editing in cells. Further provided herein are compositions comprising a guide polynucleic acid sequence, e.g. a guide RNA sequence, or a combination of 2, 3, 4, 5, 6, 7, 8, 9, 10, 11, 12, 13, 14, 15, 16, 17, 18, 19, 20, or more guide RNAs as provided herein. In some embodiments, a composition for base editing as provided herein further comprises a polynucleotide that encodes a base editor, e.g. a C-base editor or an A-base editor. For example, a composition for base editing may comprise a mRNA sequence encoding a BE, a BE4, an ABE, and a combination of one or more guide RNAs as provided. A composition for base editing may comprise a base editor polypeptide and a combination of one or more of any guide RNAs provided herein. Such a composition may be used to effect base editing in a cell through different delivery approaches, for example, electroporation, nucleofection, viral transduction or transfection. In some embodiments, the composition for base editing comprises an mRNA sequence that encodes a base editor and a combination of one or more guide RNA sequences provided herein for electroporation (EP).

[0537] Some aspects of this disclosure provide complexes comprising any of the fusion proteins provided herein, and a guide RNA bound to a nucleic acid programmable DNA binding protein (napDNAbp) domain (e.g., a Cas9 (e.g., a dCas9, a nuclease active Cas9, or a Cas9 nickase) or Cas12) of the fusion protein. These complexes are also termed ribonucleoproteins (RNPs). In some embodiments, the guide nucleic acid (e.g., guide RNA) is from 15-100 nucleotides long and comprises a sequence of at least 10 contiguous nucleotides that is complementary to a target sequence. In some embodiments, the guide RNA is 15, 16, 17, 18, 19, 20, 21, 22, 23, 24, 25, 26, 27, 28, 29, 30, 31, 32, 33, 34, 35, 36, 37, 38, 39, 40, 41, 42, 43, 44, 45, 46, 47, 48, 49, or 50 nucleotides long. In some embodiments, the guide RNA comprises a sequence of 15, 16, 17, 18, 19, 20, 21, 22, 23, 24, 25, 26, 27, 28, 29, 30, 31, 32, 33, 34, 35, 36, 37, 38, 39, or 40 contiguous nucleotides that is complementary to a target sequence. In some embodiments, the target sequence is a DNA sequence. In some embodiments, the target sequence is an RNA sequence. In some embodiments, the target sequence is a sequence in the genome of a bacteria, yeast, fungi, insect, plant, or animal. In some embodiments, the target sequence is a sequence in the genome of a human. In some embodiments, the 3′ end of the target sequence is immediately adjacent to a canonical PAM sequence (NGG). In some embodiments, the 3′ end of the target sequence is immediately adjacent to a non-canonical PAM sequence (e.g., a sequence listed in Table 7 or 5′-NAA-3′). In some embodiments, the guide nucleic acid (e.g., guide RNA) is complementary to a sequence in a gene of interest (e.g., a gene associated with a disease or disorder).

[0538] Some aspects of this disclosure provide methods of using the fusion proteins, or complexes provided herein. For example, some aspects of this disclosure provide methods comprising contacting a DNA molecule with any of the fusion proteins provided herein, and with at least one guide RNA, wherein the guide RNA is about 15-100 nucleotides long and comprises a sequence of at least 10 contiguous nucleotides that is complementary to a target sequence. In some embodiments, the 3′ end of the target sequence is immediately adjacent to an AGC, GAG, TTT, GTG, or CAA sequence. In some embodiments, the 3′ end of the target sequence is immediately adjacent to an NGA, NGCG, NGN, NNGRRT, NNNRRT, NGCG, NGCN, NGTN, NGTN, NGTN, or 5′ (TTTV) sequence. In some embodiments, the 3′ end of the target sequence is immediately adjacent to an e.g., TTN, DTTN, GTTN, ATTN, ATTC, DTTNT, WTTN, HATY, TTTN, TTTV, TTTC, TG, RTR, or YTN PAM site.

[0539] It will be understood that the numbering of the specific positions or residues in the respective sequences depends on the particular protein and numbering scheme used. Numbering might differ, e.g., in precursors of a mature protein and the mature protein itself, and differences in sequences from species to species may affect numbering. One of skill in the art will be able to identify the respective residue in any homologous protein and in the respective encoding nucleic acid by methods well known in the art, e.g., by sequence alignment and determination of homologous residues.

[0540] It will be apparent to those of skill in the art that in order to target any of the fusion proteins disclosed herein, to a target site, e.g., a site comprising a mutation to be edited, it is typically necessary to co-express the fusion protein together with a guide RNA. As explained in more detail elsewhere herein, a guide RNA typically comprises a tracrRNA framework allowing for napDNAbp (e.g., Cas9 or Cas12) binding, and a guide sequence, which confers sequence specificity to the napDNAbp:nucleic acid editing enzyme/domain fusion protein. Alternatively, the guide RNA and tracrRNA may be provided separately, as two nucleic acid molecules. In some embodiments, the guide RNA comprises a structure, wherein the guide sequence comprises a sequence that is complementary to the target sequence. The guide sequence is typically 20 nucleotides long. The sequences of suitable guide RNAs for targeting napDNAbp:nucleic acid editing enzyme/domain fusion proteins to specific genomic target sites will be apparent to those of skill in the art based on the instant disclosure. Such suitable guide RNA sequences typically comprise guide sequences that are complementary to a nucleic sequence within 50 nucleotides upstream or downstream of the target nucleotide to be edited. Some exemplary guide RNA sequences suitable for targeting any of the provided fusion proteins to specific target sequences are provided herein.

[0541] Distinct portions of sgRNA are predicted to form various features that interact with Cas9 (e.g., SpyCas9) and/or the DNA target. Six conserved modules have been identified within native crRNA:tracrRNA duplexes and single guide RNAs (sgRNAs) that direct Cas9 endonuclease activity (see Briner et al., Guide RNA Functional Modules Direct Cas9 Activity and Orthogonality Mol Cell. 2014 Oct. 23; 56(2):333-339). The six modules include the spacer responsible for DNA targeting, the upper stem, bulge, lower stem formed by the CRISPR repeat:tracrRNA duplex, the nexus, and hairpins from the 3′ end of the tracrRNA. The upper and lower stems interact with Cas9 mainly through sequence-independent interactions with the phosphate backbone. In some embodiments, the upper stem is dispensable. In some embodiments, the conserved uracil nucleotide sequence at the base of the lower stem is dispensable. The bulge participates in specific side-chain interactions with the Rec1 domain of Cas9. The nucleobase of U44 interacts with the side chains of Tyr 325 and His 328, while G43 interacts with Tyr 329. The nexus forms the core of the sgRNA:Cas9 interactions and lies at the intersection between the sgRNA and both Cas9 and the target DNA. The nucleobases of A51 and A52 interact with the side chain of Phe 1105; U56 interacts with Arg 457 and Asn 459; the nucleobase of U59 inserts into a hydrophobic pocket defined by side chains of Arg 74, Asn 77, Pro 475, Leu 455, Phe 446, and Ile 448; C60 interacts with Leu 455, Ala 456, and Asn 459, and C61 interacts with the side chain of Arg 70, which in turn interacts with C15. In some embodiments, one or more of these mutations are made in the bulge and/or the nexus of a sgRNA for a Cas9 (e.g., spyCas9) to optimize sgRNA:Cas9 interactions.

[0542] Moreover, the tracrRNA nexus and hairpins are critical for Cas9 pairing and can be swapped to cross orthogonality barriers separating disparate Cas9 proteins, which is instrumental for further harnessing of orthogonal Cas9 proteins. In some embodiments, the nexus and hairpins are swapped to target orthogonal Cas9 proteins. In some embodiments, a sgRNA is dispensed of the upper stem, hairpin 1, and/or the sequence flexibility of the lower stem to design a guide RNA that is more compact and conformationally stable. In some embodiments, the modules are modified to optimize multiplex editing using a single Cas9 with various chimeric guides or by concurrently using orthogonal systems with different combinations of chimeric sgRNAs. Details regarding guide functional modules and methods thereof are described, for example, in Briner et al., Guide RNA Functional Modules Direct Cas9 Activity and Orthogonality Mol Cell. 2014 Oct. 23; 56(2):333-339, the contents of which is incorporated by reference herein in its entirety.

[0543] The domains of the base editor disclosed herein can be arranged in any order. Non-limiting examples of a base editor comprising a fusion protein comprising e.g., a polynucleotide-programmable nucleotide-binding domain (e.g., Cas9 or Cas12) and a deaminase domain (e.g., cytidine or adenosine deaminase) can be arranged as follows:

[0544] NH2-[nucleobase editing domain]-Linker1-[nucleobase editing domain]-COOH;

[0545] NH2-[deaminase]-Linker1-[nucleobase editing domain]-COOH;

[0546] NH2-[deaminase]-Linker1-[nucleobase editing domain]-Linker2-[UGI]-COOH;

[0547] NH2-[deaminase]-Linker1-[nucleobase editing domain]-COOH;

[0548] NH2-[adenosine deaminase]-Linker1-[nucleobase editing domain]-COOH;

[0549] NH2-[nucleobase editing domain]-[deaminase]-COOH;

[0550] NH2-[deaminase]-[nucleobase editing domain]-[inosine BER inhibitor]-COOH;

[0551] NH2-[deaminase]-[inosine BER inhibitor]-[nucleobase editing domain]-COOH;

[0552] NH2-[inosine BER inhibitor]-[deaminase]-[nucleobase editing domain]-COOH;

[0553] NH2-[nucleobase editing domain]-[deaminase]-[inosine BER inhibitor]-COOH;

[0554] NH2-[nucleobase editing domain]-[inosine BER inhibitor]-[deaminase]-COOH;

[0555] NH2-[inosine BER inhibitor]-[nucleobase editing domain]-[deaminase]-COOH;

[0556] NH2-[nucleobase editing domain]-Linker1-[deaminase]-Linker2-[nucleobase editing domain]-COOH;

[0557] NH2-[nucleobase editing domain]-Linker1-[deaminase]-[nucleobase editing domain]-COOH;

[0558] NH2-[nucleobase editing domain]-[deaminase]-Linker2-[nucleobase editing domain]-COOH;

[0559] NH2-[nucleobase editing domain]-[deaminase]-[nucleobase editing domain]-COOH;

[0560] NH2-[nucleobase editing domain]-Linker1-[deaminase]-Linker2-[nucleobase editing domain]-[inosine BER inhibitor]-COOH;

[0561] NH2-[nucleobase editing domain]-Linker1-[deaminase]-[nucleobase editing domain]-[inosine BER inhibitor]-COOH;

[0562] NH2-[nucleobase editing domain]-[deaminase]-Linker2-[nucleobase editing domain]-[inosine BER inhibitor]-COOH;

[0563] NH2-[nucleobase editing domain]-[deaminase]-[nucleobase editing domain]-[inosine BER inhibitor]-COOH;

[0564] NH2-[inosine BER inhibitor]-[nucleobase editing domain]-Linker1-[deaminase]-Linker2-[nucleobase editing domain]-COOH;

[0565] NH2-[inosine BER inhibitor]-[nucleobase editing domain]-Linker1-[deaminase]-[nucleobase editing domain]-COOH;

[0566] NH2-[inosine BER inhibitor]-[nucleobase editing domain]-[deaminase]-Linker2-[nucleobase editing domain]-COOH; or

[0567] NH2-[inosine BER inhibitor]NH2-[nucleobase editing domain]-[deaminase]-[nucleobase editing domain]-COOH.

[0568] In some embodiments, the base editing fusion proteins provided herein need to be positioned at a precise location, for example, where a target base is placed within a defined region (e.g., a “deamination window”). In some embodiments, a target can be within a 4-base region. In some embodiments, such a defined target region can be approximately 15 bases upstream of the PAM. See Komor, A. C., et al., “Programmable editing of a target base in genomic DNA without double-stranded DNA cleavage” Nature 533, 420-424 (2016); Gaudelli, N. M., et al., “Programmable base editing of A⋅T to G⋅C in genomic DNA without DNA cleavage” Nature 551, 464-471 (2017); and Komor, A. C., et al., “Improved base excision repair inhibition and bacteriophage Mu Gam protein yields C:G-to-T:A base editors with higher efficiency and product purity” Science Advances 3:eaao4774 (2017), the entire contents of which are hereby incorporated by reference.

[0569] A defined target region can be a deamination window. A deamination window can be the defined region in which a base editor acts upon and deaminates a target nucleotide. In some embodiments, the deamination window is within a 2, 3, 4, 5, 6, 7, 8, 9, or 10 base regions. In some embodiments, the deamination window is 5, 6, 7, 8, 9, 10, 11, 12, 13, 14, 15, 16, 17, 18, 19, 20, 21, 22, 23, 24, or 25 bases upstream of the PAM.

[0570] The base editors of the present disclosure can comprise any domain, feature or amino acid sequence which facilitates the editing of a target polynucleotide sequence. For example, in some embodiments, the base editor comprises a nuclear localization sequence (NLS). In some embodiments, an NLS of the base editor is localized between a deaminase domain and a napDNAbp domain. In some embodiments, an NLS of the base editor is localized C-terminal to a napDNAbp domain.

[0571] Non-limiting examples of protein domains which can be included in the fusion protein include a deaminase domain (e.g., adenosine deaminase or cytidine deaminase), a uracil glycosylase inhibitor (UGI) domain, epitope tags, reporter gene sequences, and/or protein domains having one or more of the activities described herein.

[0572] A domain may be detected or labeled with an epitope tag, a reporter protein, other binding domains. Non-limiting examples of epitope tags include histidine (His) tags, V5 tags, FLAG tags, influenza hemagglutinin (HA) tags, Myc tags, VSV-G tags, and thioredoxin (Trx) tags. Examples of reporter genes include, but are not limited to, glutathione-5-transferase (GST), horseradish peroxidase (HRP), chloramphenicol acetyltransferase (CAT) beta-galactosidase, beta-glucuronidase, luciferase, green fluorescent protein (GFP), HcRed, DsRed, cyan fluorescent protein (CFP), yellow fluorescent protein (YFP), and autofluorescent proteins including blue fluorescent protein (BFP). Additional protein sequences can include amino acid sequences that bind DNA molecules or bind other cellular molecules, including but not limited to maltose binding protein (MBP), S-tag, Lex A DNA binding domain (DBD) fusions, GAL4 DNA binding domain fusions, and herpes simplex virus (HSV) BP16 protein fusions.

### Methods of Using Fusion Proteins Comprising a Cytidine or Adenosine Deaminase and a Cas9 Domain

[0573] Some aspects of this disclosure provide methods of using the fusion proteins, or complexes provided herein. For example, some aspects of this disclosure provide methods comprising contacting a DNA molecule with any of the fusion proteins provided herein, and with at least one guide RNA described herein.

[0574] In some embodiments, a fusion protein of the invention is used for editing a target gene of interest. In particular, a cytidine deaminase or adenosine deaminase nucleobase editor described herein is capable of making multiple mutations within a target sequence. These mutations may affect the function of the target. For example, when a cytidine deaminase or adenosine deaminase nucleobase editor is used to target a regulatory region the function of the regulatory region is altered and the expression of the downstream protein is reduced or eliminated.

[0575] It will be understood that the numbering of the specific positions or residues in the respective sequences depends on the particular protein and numbering scheme used. Numbering might be different, e.g., in precursors of a mature protein and the mature protein itself, and differences in sequences from species to species may affect numbering. One of skill in the art will be able to identify the respective residue in any homologous protein and in the respective encoding nucleic acid by methods well known in the art, e.g., by sequence alignment and determination of homologous residues.

[0576] It will be apparent to those of skill in the art that in order to target any of the fusion proteins comprising a Cas9 domain and a cytidine or adenosine deaminase, as disclosed herein, to a target site, e.g., a site comprising a mutation to be edited, it is typically necessary to co-express the fusion protein together with a guide RNA, e.g., an sgRNA. As explained in more detail elsewhere herein, a guide RNA typically comprises a tracrRNA framework allowing for Cas9 binding, and a guide sequence, which confers sequence specificity to the Cas9:nucleic acid editing enzyme/domain fusion protein. Alternatively, the guide RNA and tracrRNA may be provided separately, as two nucleic acid molecules. In some embodiments, the guide RNA comprises a structure, wherein the guide sequence comprises a sequence that is complementary to the target sequence. The guide sequence is typically 20 nucleotides long. The sequences of suitable guide RNAs for targeting Cas9:nucleic acid editing enzyme/domain fusion proteins to specific genomic target sites will be apparent to those of skill in the art based on the instant disclosure. Such suitable guide RNA sequences typically comprise guide sequences that are complementary to a nucleic sequence within 50 nucleotides upstream or downstream of the target nucleotide to be edited. Some exemplary guide RNA sequences suitable for targeting any of the provided fusion proteins to specific target sequences are provided herein.

### Base Editor Efficiency

[0577] In some embodiments, the purpose of the methods provided herein is to alter a gene and/or gene product via gene editing. The nucleobase editing proteins provided herein can be used for gene editing-based human therapeutics in vitro or in vivo. It will be understood by the skilled artisan that the nucleobase editing proteins provided herein, e.g., the fusion proteins comprising a polynucleotide programmable nucleotide binding domain (e.g., Cas9) and a nucleobase editing domain (e.g., an adenosine deaminase domain or a cytidine deaminase domain) can be used to edit a nucleotide from A to G or C to T.

[0578] Advantageously, base editing systems as provided herein provide genome editing without generating double-strand DNA breaks, without requiring a donor DNA template, and without inducing an excess of stochastic insertions and deletions as CRISPR may do. In some embodiments, the present disclosure provides base editors that efficiently generate an intended mutation, such as a STOP codon, in a nucleic acid (e.g., a nucleic acid within a genome of a subject) without generating a significant number of unintended mutations, such as unintended point mutations. In some embodiments, an intended mutation is a mutation that is generated by a specific base editor (e.g., adenosine base editor or cytidine base editor) bound to a guide polynucleotide (e.g., gRNA), specifically designed to generate the intended mutation. In some embodiments, the intended mutation is in a gene associated with a target antigen associated with a disease or disorder, e.g., a hemoglobinopathy (e.g., sickle cell disease). In some embodiments, the intended mutation is an adenine (A) to guanine (G) point mutation (e.g., SNP) in a gene associated with a target antigen associated with a disease or disorder, e.g. a hemoglobinopathy (e.g., sickle cell disease). In some embodiments, the intended mutation is an adenine (A) to guanine (G) point mutation within the coding region or non-coding region of a gene (e.g., regulatory region or element). In some embodiments, the intended mutation is a cytosine (C) to thymine (T) point mutation (e.g., SNP) in a gene associated with a target antigen associated with a disease or disorder, e.g., a hemoglobinopathy (e.g., sickle cell disease). In some embodiments, the intended mutation is a cytosine (C) to thymine (T) point mutation within the coding region or non-coding region of a gene (e.g., regulatory region or element). In some embodiments, the intended mutation is a point mutation that generates a STOP codon, for example, a premature STOP codon within the coding region of a gene. In some embodiments, the intended mutation is a mutation that eliminates a stop codon.

[0579] The base editors of the invention advantageously modify a specific nucleotide base encoding a protein without generating a significant proportion of indels. An “indel”, as used herein, refers to the insertion or deletion of a nucleotide base within a nucleic acid. Such insertions or deletions can lead to frame shift mutations within a coding region of a gene. In some embodiments, it is desirable to generate base editors that efficiently modify (e.g. mutate) a specific nucleotide within a nucleic acid, without generating a large number of insertions or deletions (i.e., indels) in the nucleic acid. In some embodiments, it is desirable to generate base editors that efficiently modify (e.g. mutate or methylate) a specific nucleotide within a nucleic acid, without generating a large number of insertions or deletions (i.e., indels) in the nucleic acid. In certain embodiments, any of the base editors provided herein can generate a greater proportion of intended modifications (e.g., methylations) versus indels. In certain embodiments, any of the base editors provided herein can generate a greater proportion of intended modifications (e.g., mutations) versus indels.

[0580] In some embodiments, the base editors provided herein are capable of generating a ratio of intended mutations to indels (i.e., intended point mutations:unintended point mutations) that is greater than 1:1. In some embodiments, the base editors provided herein are capable of generating a ratio of intended mutations to indels that is at least 1.5:1, at least 2:1, at least 2.5:1, at least 3:1, at least 3.5:1, at least 4:1, at least 4.5:1, at least 5:1, at least 5.5:1, at least 6:1, at least 6.5:1, at least 7:1, at least 7.5:1, at least 8:1, at least 10:1, at least 12:1, at least 15:1, at least 20:1, at least 25:1, at least 30:1, at least 40:1, at least 50:1, at least 100:1, at least 200:1, at least 300:1, at least 400:1, at least 500:1, at least 600:1, at least 700:1, at least 800:1, at least 900:1, or at least 1000:1, or more. The number of intended mutations and indels may be determined using any suitable method.

[0581] In some embodiments, the base editors provided herein can limit formation of indels in a region of a nucleic acid. In some embodiments, the region is at a nucleotide targeted by a base editor or a region within 2, 3, 4, 5, 6, 7, 8, 9, or 10 nucleotides of a nucleotide targeted by a base editor. In some embodiments, any of the base editors provided herein can limit the formation of indels at a region of a nucleic acid to less than 1%, less than 1.5%, less than 2%, less than 2.5%, less than 3%, less than 3.5%, less than 4%, less than 4.5%, less than 5%, less than 6%, less than 7%, less than 8%, less than 9%, less than 10%, less than 12%, less than 15%, or less than 20%. The number of indels formed at a nucleic acid region may depend on the amount of time a nucleic acid (e.g., a nucleic acid within the genome of a cell) is exposed to a base editor. In some embodiments, a number or proportion of indels is determined after at least 1 hour, at least 2 hours, at least 6 hours, at least 12 hours, at least 24 hours, at least 36 hours, at least 48 hours, at least 3 days, at least 4 days, at least 5 days, at least 7 days, at least 10 days, or at least 14 days of exposing a nucleic acid (e.g., a nucleic acid within the genome of a cell) to a base editor.

[0582] Some aspects of the disclosure are based on the recognition that any of the base editors provided herein are capable of efficiently generating an intended mutation in a nucleic acid (e.g. a nucleic acid within a genome of a subject) without generating a considerable number of unintended mutations (e.g., spurious off-target editing or bystander editing). In some embodiments, an intended mutation is a mutation that is generated by a specific base editor bound to a gRNA, specifically designed to generate the intended mutation. In some embodiments, the intended mutation is a mutation that generates a stop codon, for example, a premature stop codon within the coding region of a gene. In some embodiments, the intended mutation is a mutation that eliminates a stop codon. In some embodiments, the intended mutation is a mutation that alters the splicing of a gene. In some embodiments, the intended mutation is a mutation that alters the regulatory sequence of a gene (e.g., a gene promotor or gene repressor). In some embodiments, any of the base editors provided herein are capable of generating a ratio of intended mutations to unintended mutations (e.g., intended mutations:unintended mutations) that is greater than 1:1. In some embodiments, any of the base editors provided herein are capable of generating a ratio of intended mutations to unintended mutations that is at least 1.5:1, at least 2:1, at least 2.5:1, at least 3:1, at least 3.5:1, at least 4:1, at least 4.5:1, at least 5:1, at least 5.5:1, at least 6:1, at least 6.5:1, at least 7:1, at least 7.5:1, at least 8:1, at least 10:1, at least 12:1, at least 15:1, at least 20:1, at least 25:1, at least 30:1, at least 40:1, at least 50:1, at least 100:1, at least 150:1, at least 200:1, at least 250:1, at least 500:1, or at least 1000:1, or more. It should be appreciated that the characteristics of the base editors described herein may be applied to any of the fusion proteins, or methods of using the fusion proteins provided herein.

[0583] Base editing is often referred to as a “modification”, such as, a genetic modification, a gene modification and modification of the nucleic acid sequence and is clearly understandable based on the context that the modification is a base editing modification. A base editing modification is therefore a modification at the nucleotide base level, for example as a result of the deaminase activity discussed throughout the disclosure, which then results in a change in the gene sequence, and may affect the gene product. In essence therefore, the gene editing modification described herein may result in a modification of the gene, structurally and/or functionally, wherein the expression of the gene product may be modified, for example, the expression of the gene is knocked out; or conversely, enhanced, or, in some circumstances, the gene function or activity may be modified. Using the methods disclosed herein, a base editing efficiency may be determined as the knockdown efficiency of the gene in which the base editing is performed, wherein the base editing is intended to knockdown the expression of the gene. A knockdown level may be validated quantitatively by determining the expression level by any detection assay, such as assay for protein expression level, for example, by flow cytometry; assay for detecting RNA expression such as quantitative RT-PCR, northern blot analysis, or any other suitable assay such as pyrosequencing; and may be validated qualitatively by nucleotide sequencing reactions.

[0584] In some embodiments, the modification, e.g., single base edit results in at least 10% reduction of the gene targeted expression. In some embodiments, the base editing efficiency may result in at least 10% reduction of the gene targeted expression. In some embodiments, the base editing efficiency may result in at least 20% reduction of the gene targeted expression. In some embodiments, the base editing efficiency may result in at least 30% reduction of the gene targeted expression. In some embodiments, the base editing efficiency may result in at least 40% reduction of the gene targeted expression. In some embodiments, the base editing efficiency may result in at least 50% reduction of the gene targeted expression. In some embodiments, the base editing efficiency may result in at least 60% reduction of the targeted gene expression. In some embodiments, the base editing efficiency may result in at least 70% reduction of the targeted gene expression. In some embodiments, the base editing efficiency may result in at least 80% reduction of the targeted gene expression. In some embodiments, the base editing efficiency may result in at least 90% reduction of the targeted gene expression. In some embodiments, the base editing efficiency may result in at least 91% reduction of the targeted gene expression. In some embodiments, the base editing efficiency may result in at least 92% reduction of the targeted gene expression. In some embodiments, the base editing efficiency may result in at least 93% reduction of the targeted gene expression. In some embodiments, the base editing efficiency may result in at least 94% reduction of the targeted gene expression. In some embodiments, the base editing efficiency may result in at least 95% reduction of the targeted gene expression. In some embodiments, the base editing efficiency may result in at least 96% reduction of the targeted gene expression. In some embodiments, the base editing efficiency may result in at least 97% reduction of the targeted gene expression. In some embodiments, the base editing efficiency may result in at least 98% reduction of the targeted gene expression. In some embodiments, the base editing efficiency may result in at least 99% reduction of the targeted gene expression. In some embodiments, the base editing efficiency may result in knockout (100% knockdown of the gene expression) of the gene that is targeted.

[0585] In some embodiments, any of base editor systems provided herein result in less than 500, less than 40%, less than 30%, less than 20%, less than 19/o, less than 18%, less than 17%, less than 16%, less than 15%, less than 14%, less than 13%, less than 12%, less than 11%, less than 10%, less than 9%, less than 8%, less than 7%, less than 6%, less than 5%, less than 4%, less than 3%, less than 2%, less than 1%, less than 0.9%, less than 0.8%, less than 0.7%, less than 0.6%, less than 0.5%, less than 0.4%, less than 0.3%, less than 0.2%, less than 0.1%, less than 0.09%, less than 0.08%, less than 0.07%, less than 0.06%, less than 0.05%, less than 0.04%, less than 0.03%, less than 0.02%, or less than 0.01% indel formation in the target polynucleotide sequence.

[0586] In some embodiments, targeted modifications, e.g., single base editing, are used simultaneously to target at least 4, 5, 6, 7, 8, 9, 10, 11, 12 13, 14, 15, 16, 17, 18, 19, 20, 21, 22, 23, 24, 25, 26, 27, 28, 29, 30, 31, 32, 33, 34, 35, 36, 37, 38, 39, 40, 41, 42, 43, 44, 45, 46, 47, 48, 49 or 50 different endogenous sequences for base editing with different guide RNAs. In some embodiments, targeted modifications, e.g. single base editing, are used to sequentially target at least 4, 5, 6, 7, 8, 9, 10, 11, 12 13, 14, 15, 16, 17, 18, 19, 20, 21, 22, 23, 24, 25, 26, 27, 28, 29, 30, 31, 32, 33, 34, 35, 36, 37, 38, 39, 40, 41, 42, 43, 44, 45, 46, 47, 48, 49 50, or more different endogenous gene sequences for base editing with different guide RNAs.

[0587] Some aspects of the disclosure are based on the recognition that any of the base editors provided herein are capable of efficiently generating an intended mutation, such as a point mutation, in a nucleic acid (e.g., a nucleic acid within a genome of a subject) without generating a significant number of unintended mutations, such as unintended point mutations (i.e., mutation of bystanders). In some embodiments, any of the base editors provided herein are capable of generating at least 0.01% of intended mutations (i.e., at least 0.010% base editing efficiency). In some embodiments, any of the base editors provided herein are capable of generating at least 0.01%, 1%, 2%, 3%, 4%, 5%, 10%, 15%, 20%, 25%, 30%, 40%, 45%, 50%, 60%, 70%, 80%, 90%, 95%, or 99% of intended mutations.

[0588] In some embodiments, any of base editor systems comprising one of the ABE8 base editor variants described herein result in less than 50%, less than 40%, less than 30%, less than 20%, less than 19%, less than 18%, less than 17%, less than 16%, less than 15%, less than 14%, less than 13%, less than 12%, less than 11%, less than 10%, less than 9%, less than 8%, less than 7%, less than 6%, less than 5%, less than 4%, less than 3%, less than 2%, less than 1%, less than 0.9%, less than 0.8%, less than 0.7%, less than 0.6%, less than 0.5%, less than 0.4%, less than 0.3%, less than 0.2%, less than 0.1%, less than 0.09%, less than 0.08%, less than 0.07%, less than 0.06%, less than 0.05%, less than 0.04%, less than 0.03%, less than 0.02%, or less than 0.01% indel formation in the target polynucleotide sequence. In some embodiments, any of base editor systems comprising one of the ABE8 base editor variants described herein result in less than 0.8% indel formation in the target polynucleotide sequence. In some embodiments, any of base editor systems comprising one of the ABE8 base editor variants described herein result in at most 0.8% indel formation in the target polynucleotide sequence. In some embodiments, any of base editor systems comprising one of the ABE8 base editor variants described herein result in less than 0.3% indel formation in the target polynucleotide sequence. In some embodiments, any of base editor systems comprising one of the ABE8 base editor variants described results in lower indel formation in the target polynucleotide sequence compared to a base editor system comprising one of ABE7 base editors. In some embodiments, any of base editor systems comprising one of the ABE8 base editor variants described herein results in lower indel formation in the target polynucleotide sequence compared to a base editor system comprising an ABE7.10.

[0589] In some embodiments, any of base editor systems comprising one of the ABE8 base editor variants described herein has reduction in indel frequency compared to a base editor system comprising one of the ABE7 base editors. In some embodiments, any of base editor systems comprising one of the ABE8 base editor variants described herein has at least 0.01%, at least 1%, at least 2%, at least 3%, at least 4%, at least 5%, at least 10%, at least 15%, at least 20%, at least 25%, at least 30%, at least 35%, at least 40%, at least 45%, at least 50%, at least 55%, at least 60%, at least 65%, at least 70%, at least 75%, at least 80%, at least 85%, at least 90%, or at least 95% reduction in indel frequency compared to a base editor system comprising one of the ABE7 base editors. In some embodiments, a base editor system comprising one of the ABE8 base editor variants described herein has at least 0.01%, at least 1%, at least 2%, at least 3%, at least 4%, at least 5%, at least 10%, at least 15%, at least 20%, at least 25%, at least 30%, at least 35%, at least 40%, at least 45%, at least 50%, at least 55%, at least 60%, at least 65%, at least 70%, at least 75%, at least 80%, at least 85%, at least 90%, or at least 95% reduction in indel frequency compared to a base editor system comprising an ABE7.10.

[0590] The invention provides adenosine deaminase variants (e.g., ABE8 variants) that have increased efficiency and specificity. In particular, the adenosine deaminase variants described herein are more likely to edit a desired base within a polynucleotide, and are less likely to edit bases that are not intended to be altered (e.g., “bystanders”).

[0591] In some embodiments, any of the base editing system comprising one of the ABE8 base editor variants described herein has reduced bystander editing or mutations. In some embodiments, an unintended editing or mutation is a bystander mutation or bystander editing, for example, base editing of a target base (e.g., A or C) in an unintended or non-target position in a target window of a target nucleotide sequence. In some embodiments, any of the base editing system comprising one of the ABE8 base editor variants described herein has reduced bystander editing or mutations compared to a base editor system comprising an ABE7 base editor, e.g., ABE7.10. In some embodiments, any of the base editing system comprising one of the ABE8 base editor variants described herein has reduced bystander editing or mutations by at least 1%, at least 2%, at least 3%, at least 4%, at least 5%, at least 10%, at least 15%, at least 20%, at least 25%, at least 30%, at least 35%, at least 40%, at least 45%, at least 50%, at least 55%, at least 60%, at least 65%, at least 70%, at least 75%, at least 80%, at least 85%, at least 90%, at least 95%, or at least 99% compared to a base editor system comprising an ABE7 base editor, e.g., ABE7.10. In some embodiments, any of the base editing system comprising one of the ABE8 base editor variants described herein has reduced bystander editing or mutations by at least 1.1 fold, at least 1.2 fold, at least 1.3 fold, at least 1.4 fold, at least 1.5 fold, at least 1.6 fold, at least 1.7 fold, at least 1.8 fold, at least 1.9 fold, at least 2.0 fold, at least 2.1 fold, at least 2.2 fold, at least 2.3 fold, at least 2.4 fold, at least 2.5 fold, at least 2.6 fold, at least 2.7 fold, at least 2.8 fold, at least 2.9 fold, or at least 3.0 fold compared to a base editor system comprising an ABE7 base editor, e.g., ABE7.10.

[0592] In some embodiments, any of the base editing system comprising one of the ABE8 base editor variants described herein has reduced spurious editing. In some embodiments, an unintended editing or mutation is a spurious mutation or spurious editing, for example, non-specific editing or guide independent editing of a target base (e.g., A or C) in an unintended or non-target region of the genome. In some embodiments, any of the base editing system comprising one of the ABE8 base editor variants described herein has reduced spurious editing compared to a base editor system comprising an ABE7 base editor, e.g., ABE7.10. In some embodiments, any of the base editing system comprising one of the ABE8 base editor variants described herein has reduced spurious editing by at least 1%, at least 2%, at least 3%, at least 4%, at least 5%, at least 10%, at least 15%, at least 20%, at least 25%, at least 30%, at least 35%, at least 40%, at least 45%, at least 50%, at least 55%, at least 60%, at least 65%, at least 70%, at least 75%, at least 80%, at least 85%, at least 90%, at least 95%, or at least 99% compared to a base editor system comprising an ABE7 base editor, e.g., ABE7.10. In some embodiments, any of the base editing system comprising one of the ABE8 base editor variants described herein has reduced spurious editing by at least 1.1 fold, at least 1.2 fold, at least 1.3 fold, at least 1.4 fold, at least 1.5 fold, at least 1.6 fold, at least 1.7 fold, at least 1.8 fold, at least 1.9 fold, at least 2.0 fold, at least 2.1 fold, at least 2.2 fold, at least 2.3 fold, at least 2.4 fold, at least 2.5 fold, at least 2.6 fold, at least 2.7 fold, at least 2.8 fold, at least 2.9 fold, or at least 3.0 fold compared to a base editor system comprising an ABE7 base editor, e.g., ABE7.10.

[0593] In some embodiments, any of the ABE8 base editor variants described herein have at least 0.01%, at least 1%, at least 2%, at least 3%, at least 4%, at least 5%, at least 10%, at least 15%, at least 20%, at least 25%, at least 30%, at least 35%, at least 40%, at least 45%, at least 50%, at least 55%, at least 60%, at least 65%, at least 70%, at least 75%, at least 80%, at least 85%, at least 90%, at least 95%, or at least 99% base editing efficiency. In some embodiments, the base editing efficiency may be measured by calculating the percentage of edited nucleobases in a population of cells. In some embodiments, any of the ABE8 base editor variants described herein have base editing efficiency of at least 0.01%, at least 1%, at least 2%, at least 3%, at least 4%, at least 5%, at least 10%, at least 15%, at least 20%, at least 25%, at least 30%, at least 35%, at least 40%, at least 45%, at least 50%, at least 55%, at least 60%, at least 65%, at least 70%, at least 75%, at least 80%, at least 85%, at least 90%, at least 95%, or at least 99% as measured by edited nucleobases in a population of cells.

[0594] In some embodiments, any of the ABE8 base editor variants described herein has higher base editing efficiency compared to the ABE7 base editors. In some embodiments, any of the ABE8 base editor variants described herein have at least 1%, at least 2%, at least 3%, at least 4%, at least 5%, at least 10%, at least 15%, at least 20%, at least 25%, at least 30%, at least 35%, at least 40%, at least 45%, at least 50%, at least 55%, at least 60%, at least 65%, at least 70%, at least 75%, at least 80%, at least 85%, at least 90%, at least 95%, at least 99%, at least 100%, at least 105%, at least 110%, at least 115%, at least 120%, at least 125%, at least 130%, at least 135%, at least 140%, at least 145%, at least 150%, at least 155%, at least 160%, at least 165%, at least 170%, at least 175%, at least 180%, at least 185%, at least 190%, at least 195%, at least 200%, at least 210%, at least 220%, at least 230%, at least 240%, at least 250%, at least 260%, at least 270%, at least 280%, at least 290%, at least 300%, at least 310%, at least 320%, at least 330%, at least 340%, at least 350%, at least 360%, at least 370%, at least 380%, at least 390%, at least 400%, at least 450%, or at least 500% higher base editing efficiency compared to an ABE7 base editor, e.g., ABE7.10.

[0595] In some embodiments, any of the ABE8 base editor variants described herein has at least 1.1 fold, at least 1.2 fold, at least 1.3 fold, at least 1.4 fold, at least 1.5 fold, at least 1.6 fold, at least 1.7 fold, at least 1.8 fold, at least 1.9 fold, at least 2.0 fold, at least 2.1 fold, at least 2.2 fold, at least 2.3 fold, at least 2.4 fold, at least 2.5 fold, at least 2.6 fold, at least 2.7 fold, at least 2.8 fold, at least 2.9 fold, at least 3.0 fold, at least 3.1 fold, at least 3.2, at least 3.3 fold, at least 3.4 fold, at least 3.5 fold, at least 3.6 fold, at least 3.7 fold, at least 3.8 fold, at least 3.9 fold, at least 4.0 fold, at least 4.1 fold, at least 4.2 fold, at least 4.3 fold, at least 4.4 fold, at least 4.5 fold, at least 4.6 fold, at least 4.7 fold, at least 4.8 fold, at least 4.9 fold, or at least 5.0 fold higher base editing efficiency compared to an ABE7 base editor, e.g., ABE7.10.

[0596] In some embodiments, any of the ABE8 base editor variants described herein have at least 0.01%, at least 1%, at least 2%, at least 3%, at least 4%, at least 5%, at least 10%, at least 15%, at least 20%, at least 25%, at least 30%, at least 35%, at least 40%, at least 45%, at least 50%, at least 55%, at least 60%, at least 65%, at least 70%, at least 75%, at least 80%, at least 85%, at least 90%, at least 95%, or at least 99% on-target base editing efficiency. In some embodiments, any of the ABE8 base editor variants described herein have on-target base editing efficiency of at least 0.01%, at least 1%, at least 2%, at least 3%, at least 4%, at least 5%, at least 10%, at least 15%, at least 20%, at least 25%, at least 30%, at least 35%, at least 40%, at least 45%, at least 50%, at least 55%, at least 60%, at least 65%, at least 70%, at least 75%, at least 80%, at least 85%, at least 90%, at least 95%, or at least 99% as measured by edited target nucleobases in a population of cells.

[0597] In some embodiments, any of the ABE8 base editor variants described herein has higher on-target base editing efficiency compared to the ABE7 base editors. In some embodiments, any of the ABE8 base editor variants described herein have at least 1%, at least 2%, at least 3%, at least 4%, at least 5%, at least 10%, at least 15%, at least 20%, at least 25%, at least 30%, at least 35%, at least 40%, at least 45%, at least 50%, at least 55%, at least 60%, at least 65%, at least 70%, at least 75%, at least 80%, at least 85%, at least 90%, at least 95%, at least 99%, at least 100%, at least 105%, at least 110%, at least 115%, at least 120%, at least 125%, at least 130%, at least 135%, at least 140%, at least 145%, at least 150%, at least 155%, at least 160%, at least 165%, at least 170%, at least 175%, at least 180%, at least 185%, at least 190%, at least 195%, at least 200%, at least 210%, at least 220%, at least 230%, at least 240%, at least 250%, at least 260%, at least 270%, at least 280%, at least 290%, at least 300%, at least 310%, at least 320%, at least 330%, at least 340%, at least 350%, at least 360%, at least 370%, at least 380%, at least 390%, at least 400%, at least 450%, or at least 500% higher on-target base editing efficiency compared to an ABE7 base editor, e.g., ABE7.10.

[0598] In some embodiments, any of the ABE8 base editor variants described herein has at least 1.1 fold, at least 1.2 fold, at least 1.3 fold, at least 1.4 fold, at least 1.5 fold, at least 1.6 fold, at least 1.7 fold, at least 1.8 fold, at least 1.9 fold, at least 2.0 fold, at least 2.1 fold, at least 2.2 fold, at least 2.3 fold, at least 2.4 fold, at least 2.5 fold, at least 2.6 fold, at least 2.7 fold, at least 2.8 fold, at least 2.9 fold, at least 3.0 fold, at least 3.1 fold, at least 3.2 fold, at least 3.3 fold, at least 3.4 fold, at least 3.5 fold, at least 3.6 fold, at least 3.7 fold, at least 3.8 fold, at least 3.9 fold, at least 4.0 fold, at least 4.1 fold, at least 4.2 fold, at least 4.3 fold, at least 4.4 fold, at least 4.5 fold, at least 4.6 fold, at least 4.7 fold, at least 4.8 fold, at least 4.9 fold, or at least 5.0 fold higher on-target base editing efficiency compared to an ABE7 base editor, e.g., ABE7.10.

[0599] The ABE8 base editor variants described herein may be delivered to a host cell via a plasmid, a vector, a LNP complex, or an mRNA. In some embodiments, any of the ABE8 base editor variants described herein is delivered to a host cell as an mRNA. In some embodiments, an ABE8 base editor delivered via a nucleic acid based delivery system, e.g., an mRNA, has on-target editing efficiency of at least at least 1%, at least 2%, at least 3%, at least 4%, at least 5%, at least 10%, at least 15%, at least 20%, at least 25%, at least 30%, at least 35%, at least 40%, at least 45%, at least 50%, at least 55%, at least 60%, at least 65%, at least 70%, at least 75%, at least 80%, at least 85%, at least 90%, at least 95%, or at least 99% as measured by edited nucleobases. In some embodiments, an ABE8 base editor delivered by an mRNA system has higher base editing efficiency compared to an ABE8 base editor delivered by a plasmid or vector system. In some embodiments, any of the ABE8 base editor variants described herein has at least 1%, at least 2%, at least 3%, at least 4%, at least 5%, at least 10%, at least 15%, at least 20%, at least 25%, at least 30%, at least 35%, at least 40%, at least 45%, at least 50%, at least 55%, at least 60%, at least 65%, at least 70%, at least 75%, at least 80%, at least 85%, at least 90%, at least 95%, at least 99%, at least 100%, at least 105%, at least 110%, at least 115%, at least 120%, at least 125%, at least 130%, at least 135%, at least 140%, at least 145%, at least 150%, at least 155%, at least 160%, at least 165%, at least 170%, at least 175%, at least 180%, at least 185%, at least 190%, at least 195%, at least 200%, at least 210%, at least 220%%, at least 230%, at least 240%, at least 250%, at least 260%, at least 270%, at least 280%, at least 290%, at least 300% higher, at least 310%, at least 320%, at least 330%, at least 340%, at least 350%, at least 360%, at least 370%, at least 380%, at least 390%, at least 400%, at least 450%, or at least 500% on-target editing efficiency when delivered by an mRNA system compared to when delivered by a plasmid or vector system. In some embodiments, any of the ABE8 base editor variants described herein has at least 1.1 fold, at least 1.2 fold, at least 1.3 fold, at least 1.4 fold, at least 1.5 fold, at least 1.6 fold, at least 1.7 fold, at least 1.8 fold, at least 1.9 fold, at least 2.0 fold, at least 2.1 fold, at least 2.2 fold, at least 2.3 fold, at least 2.4 fold, at least 2.5 fold, at least 2.6 fold, at least 2.7 fold, at least 2.8 fold, at least 2.9 fold, at least 3.0 fold, at least 3.1 fold, at least 3.2 fold, at least 3.3 fold, at least 3.4 fold, at least 3.5 fold, at least 3.6 fold, at least 3.7 fold, at least 3.8 fold, at least 3.9 fold, at least 4.0 fold, at least 4.1 fold, at least 4.2 fold, at least 4.3 fold, at least 4.4 fold, at least 4.5 fold, at least 4.6 fold, at least 4.7 fold, at least 4.8 fold, at least 4.9 fold, or at least 5.0 fold higher on-target editing efficiency when delivered by an mRNA system compared to when delivered by a plasmid or vector system.

[0600] In some embodiments, any of base editor systems comprising one of the ABE8 base editor variants described herein result in less than 50%, less than 40%, less than 30%, less than 20%, less than 19%, less than 18%, less than 17%, less than 16%, less than 15%, less than 14%, less than 13%, less than 12%, less than 11%, less than 10%, less than 9%, less than 8%, less than 7%, less than 6%, less than 5%, less than 4%, less than 3%, less than 2%, less than 1%, less than 0.9%, less than 0.8%, less than 0.7%, less than 0.6%, less than 0.5%, less than 0.4%, less than 0.3%, less than 0.2%, less than 0.1%, less than 0.09%, less than 0.08%, less than 0.07%, less than 0.06%, less than 0.05%, less than 0.04%, less than 0.03%, less than 0.02%, or less than 0.01% off-target editing in the target polynucleotide sequence.

[0601] In some embodiments, any of the ABE8 base editor variants described herein has lower guided off-target editing efficiency when delivered by an mRNA system compared to when delivered by a plasmid or vector system. In some embodiments, any of the ABE8 base editor variants described herein has at least 1%, at least 2%, at least 3%, at least 4%, at least 5%, at least 10%, at least 15%, at least 20%, at least 25%, at least 30%, at least 35%, at least 40%, at least 45%, at least 50%, at least 55%, at least 60%, at least 65%, at least 70%, at least 75%, at least 80%, at least 85%, at least 90%, at least 95%, or at least 99% lower guided off-target editing efficiency when delivered by an mRNA system compared to when delivered by a plasmid or vector system. In some embodiments, any of the ABE8 base editor variants described herein has at least 1.1 fold, at least 1.2 fold, at least 1.3 fold, at least 1.4 fold, at least 1.5 fold, at least 1.6 fold, at least 1.7 fold, at least 1.8 fold, at least 1.9 fold, at least 2.0 fold, at least 2.1 fold, at least 2.2 fold, at least 2.3 fold, at least 2.4 fold, at least 2.5 fold, at least 2.6 fold, at least 2.7 fold, at least 2.8 fold, at least 2.9 fold, or at least 3.0 fold lower guided off-target editing efficiency when delivered by an mRNA system compared to when delivered by a plasmid or vector system. In some embodiments, any of the ABE8 base editor variants described herein has at least about 2.2 fold decrease in guided off-target editing efficiency when delivered by an mRNA system compared to when delivered by a plasmid or vector system.

[0602] In some embodiments, any of the ABE8 base editor variants described herein has lower guide-independent off-target editing efficiency when delivered by an mRNA system compared to when delivered by a plasmid or vector system. In some embodiments, any of the ABE8 base editor variants described herein has at least 1%, at least 2%, at least 3%, at least 4%, at least 5%, at least 10%, at least 15%, at least 20%, at least 25%, at least 30%, at least 35%, at least 40%, at least 45%, at least 50%, at least 55%, at least 60%, at least 65%, at least 70%, at least 75%, at least 80%, at least 85%, at least 90%, at least 95%, or at least 99% lower guide-independent off-target editing efficiency when delivered by an mRNA system compared to when delivered by a plasmid or vector system. In some embodiments, any of the ABE8 base editor variants described herein has at least 1.1 fold, at least 1.2 fold, at least 1.3 fold, at least 1.4 fold, at least 1.5 fold, at least 1.6 fold, at least 1.7 fold, at least 1.8 fold, at least 1.9 fold, at least 2.0 fold, at least 2.1 fold, at least 2.2 fold, at least 2.3 fold, at least 2.4 fold, at least 2.5 fold, at least 2.6 fold, at least 2.7 fold, at least 2.8 fold, at least 2.9 fold, at least 3.0 fold, at least 5.0 fold, at least 10.0 fold, at least 20.0 fold, at least 50.0 fold, at least 70.0 fold, at least 100.0 fold, at least 120.0 fold, at least 130.0 fold, or at least 150.0 fold lower guide-independent off-target editing efficiency when delivered by an mRNA system compared to when delivered by a plasmid or vector system. In some embodiments, ABE8 base editor variants described herein has 134.0 fold decrease in guide-independent off-target editing efficiency (e.g., spurious RNA deamination) when delivered by an mRNA system compared to when delivered by a plasmid or vector system. In some embodiments, ABE8 base editor variants described herein does not increase guide-independent mutation rates across the genome.

[0603] In some embodiments, a single gene delivery event (e.g., by transduction, transfection, electroporation or any other method) can be used to target base editing of 5 sequences within a cell's genome. In some embodiments, a single gene delivery event can be used to target base editing of 6 sequences within a cell's genome. In some embodiments, a single gene delivery event can be used to target base editing of 7 sequences within a cell's genome. In some embodiments, a single electroporation event can be used to target base editing of 8 sequences within a cell's genome. In some embodiments, a single gene delivery event can be used to target base editing of 9 sequences within a cell's genome. In some embodiments, a single gene delivery event can be used to target base editing of 10 sequences within a cell's genome. In some embodiments, a single gene delivery event can be used to target base editing of 20 sequences within a cell's genome. In some embodiments, a single gene delivery event can be used to target base editing of 30 sequences within a cell's genome. In some embodiments, a single gene delivery event can be used to target base editing of 40 sequences within a cell's genome. In some embodiments, a single gene delivery event can be used to target base editing of 50 sequences within a cell's genome.

[0604] In some embodiments, the method described herein, for example, the base editing methods has minimum to no off-target effects.

[0605] In some embodiments, the base editing method described herein results in at least 50% of a cell population that have been successfully edited (i.e., cells that have been successfully engineered). In some embodiments, the base editing method described herein results in at least 55% of a cell population that have been successfully edited. In some embodiments, the base editing method described herein results in at least 60% of a cell population that have been successfully edited. In some embodiments, the base editing method described herein results in at least 65% of a cell population that have been successfully edited. In some embodiments, the base editing method described herein results in at least 70% of a cell population that have been successfully edited. In some embodiments, the base editing method described herein results in at least 75% of a cell population that have been successfully edited. In some embodiments, the base editing method described herein results in at least 80% of a cell population that have been successfully edited. In some embodiments, the base editing method described herein results in at least 85% of a cell population that have been successfully edited. In some embodiments, the base editing method described herein results in at least 90% of a cell population that have been successfully edited. In some embodiments, the base editing method described herein results in at least 95% of a cell population that have been successfully edited. In some embodiments, the base editing method described herein results in about 91%, 92%, 93%, 94%, 95%, 96%, 97%, 98%, 99% or 100% of a cell population that have been successfully edited.

[0606] In some embodiments, the live cell recovery following a base editing intervention is greater than at least 60%, 70%, 80%, 90% of the starting cell population at the time of the base editing event. In some embodiments, the live cell recovery as described above is about 70%. In some embodiments, the live cell recovery as described above is about 75%. In some embodiments, the live cell recovery as described above is about 80%. In some embodiments, the live cell recovery as described above is about 85%. In some embodiments, the live cell recovery as described above is about 90%, or about 91%, 92%, 93%, 94% 95%, 96%, 97%, 98%, or 99%, or 100% of the cells in the population at the time of the base editing event.

[0607] In some embodiments the engineered cell population can be further expanded in vitro by about 2 fold, about 3-fold, about 4-fold, about 5-fold, about 6-fold, about 7-fold, about 8-fold, about 9-fold, about 10-fold, about 15-fold, about 20-fold, about 25-fold, about 30-fold, about 35-fold, about 40-fold, about 45-fold, about 50-fold, or about 100-fold.

[0608] The number of intended mutations and indels can be determined using any suitable method, for example, as described in International PCT Application Nos. PCT/2017/045381 (WO2018/027078) and PCT/US2016/058344 (WO2017/070632); Komor, A. C., et al., “Programmable editing of a target base in genomic DNA without double-stranded DNA cleavage” Nature 533, 420-424 (2016); Gaudelli, N. M., et al., “Programmable base editing of A⋅T to G⋅C in genomic DNA without DNA cleavage” Nature 551, 464-471 (2017); and Komor, A. C., et al., “Improved base excision repair inhibition and bacteriophage Mu Gam protein yields C:G-to-T:A base editors with higher efficiency and product purity” Science Advances 3:eaao4774 (2017); the entire contents of which are hereby incorporated by reference.

[0609] In some embodiments, to calculate indel frequencies, sequencing reads are scanned for exact matches to two 10-bp sequences that flank both sides of a window in which indels can occur. If no exact matches are located, the read is excluded from analysis. If the length of this indel window exactly matches the reference sequence the read is classified as not containing an indel. If the indel window is two or more bases longer or shorter than the reference sequence, then the sequencing read is classified as an insertion or deletion, respectively. In some embodiments, the base editors provided herein can limit formation of indels in a region of a nucleic acid. In some embodiments, the region is at a nucleotide targeted by a base editor or a region within 2, 3, 4, 5, 6, 7, 8, 9, or 10 nucleotides of a nucleotide targeted by a base editor.

[0610] The number of indels formed at a target nucleotide region can depend on the amount of time a nucleic acid (e.g., a nucleic acid within the genome of a cell) is exposed to a base editor. In some embodiments, the number or proportion of indels is determined after at least 1 hour, at least 2 hours, at least 6 hours, at least 12 hours, at least 24 hours, at least 36 hours, at least 48 hours, at least 3 days, at least 4 days, at least 5 days, at least 7 days, at least 10 days, or at least 14 days of exposing the target nucleotide sequence (e.g., a nucleic acid within the genome of a cell) to a base editor. It should be appreciated that the characteristics of the base editors as described herein can be applied to any of the fusion proteins, or methods of using the fusion proteins provided herein.

[0611] Details of base editor efficiency are described in International PCT Application Nos. PCT/2017/045381 (WO 2018/027078) and PCT/US2016/058344 (WO 2017/070632), each of which is incorporated herein by reference for its entirety. Also see Komor, A. C., et al., “Programmable editing of a target base in genomic DNA without double-stranded DNA cleavage” Nature 533, 420-424 (2016); Gaudelli, N. M., et al., “Programmable base editing of A⋅T to G⋅C in genomic DNA without DNA cleavage” Nature 551, 464-471 (2017); and Komor, A. C., et al., “Improved base excision repair inhibition and bacteriophage Mu Gam protein yields C:G-to-T:A base editors with higher efficiency and product purity” Science Advances 3:eaao4774 (2017), the entire contents of which are hereby incorporated by reference. In some embodiments, editing of a plurality of nucleobase pairs in one or more genes using the methods provided herein results in formation of at least one intended mutation. In some embodiments, said formation of said at least one intended mutation results in the disruption the normal function of a gene. In some embodiments, said formation of said at least one intended mutation results decreases or eliminates the expression of a protein encoded by a gene. It should be appreciated that multiplex editing can be accomplished using any method or combination of methods provided herein.

### Multiplex Editing

[0612] In some embodiments, the base editor system provided herein is capable of multiplex editing of a plurality of nucleobase pairs in one or more genes. In some embodiments, the plurality of nucleobase pairs is located in the same gene or in one or more genes, wherein at least one gene is located in a different locus. In some embodiments, the multiplex editing can comprise one or more guide polynucleotides. In some embodiments, the multiplex editing can comprise one or more base editor systems. In some embodiments, the multiplex editing can comprise one or more base editor systems with a single guide polynucleotide or a plurality of guide polynucleotides. In some embodiments, the multiplex editing can comprise one or more guide polynucleotides with a single base editor system. In some embodiments, the multiplex editing can comprise at least one guide polynucleotide that does or does not require a PAM sequence to target binding to a target polynucleotide sequence. In some embodiments, the multiplex editing can comprise a mix of at least one guide polynucleotide that does not require a PAM sequence to target binding to a target polynucleotide sequence and at least one guide polynucleotide that require a PAM sequence to target binding to a target polynucleotide sequence. It should be appreciated that the characteristics of the multiplex editing using any of the base editors as described herein can be applied to any combination of methods using any base editor provided herein. It should also be appreciated that the multiplex editing using any of the base editors as described herein can comprise a sequential editing of a plurality of nucleobase pairs.

[0613] In some embodiments, the plurality of nucleobase pairs are in one more genes. In some embodiments, the plurality of nucleobase pairs is in the same gene. In some embodiments, at least one gene in the one more genes is located in a different locus.

[0614] In some embodiments, the editing is editing of the plurality of nucleobase pairs in at least one protein coding region, in at least one protein non-coding region, or in at least one protein coding region and at least one protein non-coding region.

[0615] In some embodiments, the editing is in conjunction with one or more guide polynucleotides. In some embodiments, the base editor system can comprise one or more base editor systems. In some embodiments, the base editor system can comprise one or more base editor systems in conjunction with a single guide polynucleotide or a plurality of guide polynucleotides. In some embodiments, the editing is in conjunction with one or more guide polynucleotide with a single base editor system. In some embodiments, the editing is in conjunction with at least one guide polynucleotide that does not require a PAM sequence to target binding to a target polynucleotide sequence or with at least one guide polynucleotide that requires a PAM sequence to target binding to a target polynucleotide sequence, or with a mix of at least one guide polynucleotide that does not require a PAM sequence to target binding to a target polynucleotide sequence and at least one guide polynucleotide that does require a PAM sequence to target binding to a target polynucleotide sequence. It should be appreciated that the characteristics of the multiplex editing using any of the base editors as described herein can be applied to any of combination of the methods of using any of the base editors provided herein. It should also be appreciated that the editing can comprise a sequential editing of a plurality of nucleobase pairs.

[0616] In some embodiments, the base editor system capable of multiplex editing of a plurality of nucleobase pairs in one or more genes comprises one of ABE7, ABE8, and/or ABE9 base editors. In some embodiments, the base editor system capable of multiplex editing comprising one of the ABE8 base editor variants described herein has higher multiplex editing efficiency compared to the base editor system capable of multiplex editing comprising one of ABE7 base editors. In some embodiments, the base editor system capable of multiplex editing comprising one of the ABE8 base editor variants described herein has at least 1%, at least 2%, at least 3%, at least 4%, at least 5%, at least 10%, at least 15%, at least 20%, at least 25%, at least 30%, at least 35%, at least 40%, at least 45%, at least 50%, at least 55%, at least 60%, at least 65%, at least 70%, at least 75%, at least 80%, at least 85%, at least 90%, at least 95%, at least 99%, at least 100%, at least 105%, at least 110%, at least 115%, at least 120%, at least 125%, at least 130%, at least 135%, at least 140%, at least 145%, at least 150%%, at least 155%, at least 160%, at least 165%, at least 170%, at least 175%, at least 180%, at least 185%, at least 190%, at least 195%, at least 2000, at least 210%, at least 220%, at least 230%, at least 240%, at least 250%, at least 260%, at least 270%, at least 280%, at least 290%, at least 300% higher, at least 3100, at least 320%, at least 330%, at least 340%, at least 350%, at least 360%, at least 370%, at least 380%, at least 390%, at least 400%, at least 450%, or at least 500% higher multiplex editing efficiency compared the base editor system capable of multiplex editing comprising one of ABE7 base editors. In some embodiments, the base editor system capable of multiplex editing comprising one of the ABE8 base editor variants described herein has at least 1.1 fold, at least 1.2 fold, at least 1.3 fold, at least 1.4 fold, at least 1.5 fold, at least 1.6 fold, at least 1.7 fold, at least 1.8 fold, at least 1.9 fold, at least 2.0 fold, at least 2.1 fold, at least 2.2 fold, at least 2.3 fold, at least 2.4 fold, at least 2.5 fold, at least 2.6 fold, at least 2.7 fold, at least 2.8 fold, at least 2.9 fold, at least 3.0 fold, at least 3.1 fold, at least 3.2 fold, at least 3.3 fold, at least 3.4 fold, at least 3.5 fold, at least 4.0 fold, at least 4.5 fold, at least 5.0 fold, at least 5.5 fold, or at least 6.0 fold higher multiplex editing efficiency compared the base editor system capable of multiplex editing comprising one of ABE7 base editors.

### Expression of Fusion Proteins in a Host Cell

[0617] Fusion proteins of the invention comprising an adenosine deaminase variant may be expressed in virtually any host cell of interest, including but not limited to bacteria, yeast, fungi, insects, plants, and animal cells using routine methods known to the skilled artisan. For example, a DNA encoding an adenosine deaminase of the invention can be cloned by designing suitable primers for the upstream and downstream of CDS based on the cDNA sequence The cloned DNA may be directly, or after digestion with a restriction enzyme when desired, or after addition of a suitable linker and/or a nuclear localization signal, ligated with a DNA encoding one or more additional components of a base editing system. The base editing system is translated in a host cell to form a complex.

[0618] A DNA encoding a protein domain described herein can be obtained by chemically synthesizing the DNA, or by connecting synthesized partly overlapping oligoDNA short chains by utilizing the PCR method and the Gibson Assembly method to construct a DNA encoding the full length thereof. The advantage of constructing a full-length DNA by chemical synthesis or a combination of PCR method or Gibson Assembly method is that the codon to be used can be designed in CDS full-length according to the host into which the DNA is introduced. In the expression of a heterologous DNA, the protein expression level is expected to increase by converting the DNA sequence thereof to a codon highly frequently used in the host organism. As the data of codon use frequency in host to be used, for example, the genetic code use frequency database (http://www.kazusa.or.jp/codon/index.html) disclosed in the home page of Kazusa DNA Research Institute can be used, or documents showing the codon use frequency in each host may be referred to. By reference to the obtained data and the DNA sequence to be introduced, codons showing low use frequency in the host from among those used for the DNA sequence may be converted to a codon coding the same amino acid and showing high use frequency.

[0619] An expression vector containing a DNA encoding a nucleic acid sequence-recognizing module and/or a nucleic acid base converting enzyme can be produced, for example, by linking the DNA to the downstream of a promoter in a suitable expression vector.

[0620] As the expression vector, Escherichia coli-derived plasmids (e.g., pBR322, pBR325, pUC12, pUC13); Bacillus subtilis-derived plasmids (e.g., pUB110, pTP5, pC194); yeast-derived plasmids (e.g., pSH19, pSH15); insect cell expression plasmids (e.g., pFast-Bac); animal cell expression plasmids (e.g., pA1-11, pXT1, pRc/CMV, pRc/RSV, pcDNAI/Neo); bacteriophages such as .lambda phage and the like; insect virus vectors such as baculovirus and the like (e.g., BmNPV, AcNPV); animal virus vectors such as retrovirus, vaccinia virus, adenovirus and the like, and the like are used.

[0621] Regarding the promoter to be used, any promoter appropriate for a host to be used for gene expression can be used. In a conventional method using double-stranded breaks, since the survival rate of the host cell sometimes decreases markedly due to the toxicity, it is desirable to increase the number of cells by the start of the induction by using an inductive promoter. However, since sufficient cell proliferation can also be afforded by expressing the nucleic acid-modifying enzyme complex of the present invention, a constitutive promoter can be used without limitation.

[0622] For example, when the host is an animal cell, an SR.alpha. promoter, SV40 promoter, LTR promoter, cytomegalovirus (CMV) promoter, Rous sarcoma virus (RSV) promoter, Moloney mouse leukemia virus (MoMuLV), LTR, herpes simplex virus thymidine kinase (HSV-TK) promoter, and the like can be used. Of these, CMV promoter, SR.alpha. promoter and the like are preferable.

[0623] When the host is Escherichia coli, a trp promoter, lac promoter, recA promoter, .lamda.P.sub.L promoter, lpp promoter, T7 promoter, and the like can be used.

[0624] When the host is in the genus Bacillus, the SPO1 promoter, SPO2 promoter, penP promoter, and the like can be used.

[0625] When the host is a yeast, the Gal1/10 promoter, PHO5 promoter, PGK promoter, GAP promoter, ADH promoter, and the like can be used.

[0626] When the host is an insect cell, the polyhedrin promoter, P10 promoter, and the like can be used.

[0627] When the host is a plant cell, the CaMV35S promoter, CaMV19S promoter, NOS promoter, and the like can be used.

[0628] Expression vectors for use in the present invention, besides those mentioned above, can comprise an enhancer, a splicing signal, a terminator, a polyA addition signal, a selection marker such as drug resistance gene, an auxotrophic complementary gene and the like, a replication origin, and the like can be used.

[0629] An RNA encoding a protein domain described herein can be prepared by, for example, in vitro transcription of a nucleic acid sequence encoding any of the fusion proteins disclosed herein.

[0630] A fusion protein of the invention can be intracellularly expressed by introducing into the cell an expression vector comprising a nucleic acid sequence encoding the fusion protein.

[0631] Host cells of interest include, but are not limited to, bacteria, yeast, fungi, insects, plants, and animal cells. For example, a host cell may comprise bacteria from the genus Escherichia, such as Escherichia coli K12.cndot.DH1 [Proc. Natl. Acad. Sci. USA, 60, 160 (1968)], Escherichia coli JM103 [Nucleic Acids Research, 9, 309 (1981)], Escherichia coli JA221 [Journal of Molecular Biology, 120, 517 (1978)], Escherichia coli HB101 [Journal of Molecular Biology, 41, 459 (1969)], Escherichia coli C600 [Genetics, 39, 440 (1954)] and the like.

[0632] A host cell may comprise bacteria from the genus Bacillus, for example Bacillus subtilis M1114 [Gene, 24, 255 (1983)], Bacillus subtilis 207-21 [Journal of Biochemistry, 95, 87 (1984)] and the like.

[0633] A host cell may be a yeast cell. Examples of yeast cells include Saccharomyces cerevisiae AH22, AH22R.sup.-, NA87-11A, DKD-5D, 20B-12, Schizosaccharomyces pombe NCYC1913, NCYC2036, Pichia pastoris KM71 and the like.

[0634] When the viral delivery methods utilize the virus AcNPV, cells from a cabbage armyworm larva-derived established line (Spodoptera frugiperda cell; Sf cell), MG1 cells derived from the mid-intestine of Trichoplusia ni, High Five™ cells derived from an ovary of Trichoplusia ni, Mamestra brassicae-derived cells, Estigmena acrea-derived cells and the like can be used. When the virus is BmNPV, cells of Bombyx mori-derived established line (Bombyx mori N cell; BmN cell) and the like are used. As the Sf cell, for example, Sf9 cell (ATCC CRL1711), Sf21 cell [all above, In Vivo, 13, 213-217 (1977)] and the like are used.

[0635] An insect can be any insect, for example, larva of Bombyx mori, Drosophila, cricket, and the like [Nature, 315, 592 (1985)].

[0636] Animal cells contemplated in the present invention include, but are not limited to, cell lines such as monkey COS-7 cells, monkey Vero cells, Chinese hamster ovary (CHO) cells, dhfr gene-deficient CHO cells, mouse L cells, mouse AtT-20 cells, mouse myeloma cells, rat GH3 cells, human FL cells and the like, pluripotent stem cells such as iPS cells, ES cells derived humans and other mammals, and primary cultured cells prepared from various tissues. Furthermore, zebrafish embryo, Xenopus oocyte, and the like can also be used.

[0637] Plant cells are also contemplated in the present invention. Plant cells include, but are not limited to, suspended cultured cells, callus, protoplast, leaf segment, root segment and the like prepared from various plants (e.g., grain such as rice, wheat, corn, and the like; product crops such as tomato, cucumber, eggplant and the like; garden plants such as carnations, Eustoma russellianum, and the like; and other plants such as tobacco, Arabidopsis thaliana and the like) are used.

[0638] All the above-mentioned host cells may be haploid (monoploid), or polyploid (e.g., diploid, triploid, tetraploid, etc.). Using conventional methods, mutations, in principle, introduced into only one homologous chromosome produce a heterogenous cell. Therefore, the desired phenotype is not expressed unless the mutation is dominant. For recessive mutations, acquiring a homozygous cell can be inconvenient due to labor and time requirements. In contrast, according to the present invention, since a mutation can be introduced into any allele on the homologous chromosome in the genome, the desired phenotype can be expressed in a single generation even in the case of recessive mutation, thereby solving the problem associated with conventional mutagenesis methods.

[0639] An expression vector can be introduced by a known method (e.g., the lysozyme method, the competent method, the PEG method, the CaCl₂) coprecipitation method, electroporation, microinjection, particle gun method, lipofection, Agrobacterium-mediated delivery, etc.) according to the kind of the host.

[0640] Escherichia coli can be transformed according to the methods described in, for example, Proc. Natl. Acad. Sci. USA, 69, 2110 (1972), Gene, 17, 107 (1982).

[0641] The genus Bacillus can be introduced into a vector according to the methods described in, for example, Molecular & General Genetics, 168, 111 (1979).

[0642] A yeast can be introduced into a vector according to the methods described in, for example, Methods in Enzymology, 194, 182-187 (1991), Proc. Natl. Acad. Sci. USA, 75, 1929 (1978).

[0643] An insect cell and an insect can be introduced into a vector according to the methods described in, for example, Bio/Technology, 6, 47-55 (1988).

[0644] A vector can be introduced into an animal cell according to the methods described in, for example, Cell Engineering additional volume 8, New Cell Engineering Experiment Protocol, 263-267 (1995) (published by Shujunsha), and Virology, 52, 456 (1973).

[0645] A cell comprising a vector can be cultured according to a known method according to the kind of the host. For example, when Escherichia coli or genus Bacillus is cultured, a liquid medium is preferable as a medium to be used for the culture. The medium preferably contains a carbon source, nitrogen source, inorganic substance and the like necessary for the growth of the transformant. Examples of the carbon source include glucose, dextrin, soluble starch, sucrose and the like; examples of the nitrogen source include inorganic or organic substances such as ammonium salts, nitrate salts, corn steep liquor, peptone, casein, meat extract, soybean cake, potato extract and the like, and examples of the inorganic substance include calcium chloride, sodium dihydrogen phosphate, magnesium chloride and the like. The medium may contain yeast extract, vitamins, growth promoting factor and the like. The pH of the medium is preferably about 5 about 8.

[0646] As a medium for culturing Escherichia coli, for example, M9 medium containing glucose, casamino acid [Journal of Experiments in Molecular Genetics, 431-433, Cold Spring Harbor Laboratory, New York 1972] is preferable. Where necessary, for example, agents such as 3p-indolylacrylic acid may be added to the medium to ensure an efficient function of a promoter. Escherichia coli is cultured at generally about 15 to about 43° C. Where necessary, aeration and stirring may be performed.

[0647] The genus Bacillus is cultured at generally about 30 to about 40° C. Where necessary, aeration and stirring may be performed.

[0648] Examples of the medium for culturing yeast include Burkholder minimum medium [Proc. Natl. Acad. Sci. USA, 77, 4505 (1980)], SD medium containing 0.5% casamino acid [Proc. Natl. Acad. Sci. USA, 81, 5330 (1984)] and the like. The pH of the medium is preferably about 5 to about 8. The culture is performed at generally about 20° C. to about 35° C. Where necessary, aeration and stirring may be performed.

[0649] As a medium for culturing an insect cell or insect, for example, Grace's Insect Medium [Nature, 195, 788 (1962)] containing an additive such as inactivated 10% bovine serum and the like as appropriate and the like are used. The pH of the medium is preferably about 6.2 to about 6.4. The culture is performed at generally about 27° C. Where necessary, aeration and stirring may be performed.

[0650] As a medium for culturing an animal cell, for example, minimum essential medium (MEM) containing about 5 to about 20% of fetal bovine serum [Science, 122, 501 (1952)], Dulbecco's modified Eagle medium (DMEM) [Virology, 8, 396 (1959)], RPMI 1640 medium [The Journal of the American Medical Association, 199, 519 (1967)], 199 medium [Proceeding of the Society for the Biological Medicine, 73, 1 (1950)] and the like are used. The pH of the medium is preferably about 6 to about 8. The culture is performed at generally about 30° C. to about 40° C. Where necessary, aeration and stirring may be performed.

[0651] As a medium for culturing a plant cell, for example, MS medium, LS medium, B5 medium and the like are used. The pH of the medium is preferably about 5-about 8. The culture is performed at generally about 20° C. to about 30° C. Where necessary, aeration and stirring may be performed.

[0652] When a higher eukaryotic cell, such as animal cell, insect cell, plant cell and the like is used as a host cell, a DNA encoding a base editing system of the present invention (e.g., comprising an adenosine deaminase variant) is introduced into a host cell under the regulation of an inducible promoter (e.g., metallothionein promoter (induced by heavy metal ion), heat shock protein promoter (induced by heat shock), Tet-ON/Tet-OFF system promoter (induced by addition or removal of tetracycline or a derivative thereof), steroid-responsive promoter (induced by steroid hormone or a derivative thereof) etc.), the induction substance is added to the medium (or removed from the medium) at an appropriate stage to induce expression of the nucleic acid-modifying enzyme complex, culture is performed for a given period to carry out a base editing and, introduction of a mutation into a target gene, transient expression of the base editing system can be realized.

[0653] Prokaryotic cells such as Escherichia coli and the like can utilize an inducible promoter. Examples of the inducible promoter include, but are not limited to, lac promoter (induced by IPTG), cspA promoter (induced by cold shock), araBAD promoter (induced by arabinose) and the like.

[0654] Alternatively, the above-mentioned inductive promoter can also be utilized as a vector removal mechanism when higher eukaryotic cells, such as animal cell, insect cell, plant cell and the like are used as a host cell. That is, a vector is mounted with a replication origin that functions in a host cell, and a nucleic acid encoding a protein necessary for replication (e.g., SV40 on and large T antigen, oriP and EBNA-1 etc. for animal cells), of the expression of the nucleic acid encoding the protein is regulated by the above-mentioned inducible promoter. As a result, while the vector is autonomously replicable in the presence of an induction substance, when the induction substance is removed, autonomous replication is not available, and the vector naturally falls off along with cell division (autonomous replication is not possible by the addition of tetracycline and doxycycline in Tet-OFF system vector).

### Delivery

[0655] The suitability of nucleobase editors to target one or more nucleotides in a target sequence (e.g., the hemoglobin beta subunit (HbB) gene or a promoter region of an HbG1/2 gene) is evaluated as described herein. In one embodiment, a single cell of interest is transfected, transduced, or otherwise modified with a nucleic acid molecule or molecules encoding a base editing system described herein together with a small amount of a vector encoding a reporter (e.g., GFP). These cells can be any cell line known in the art, including. Alternatively, primary cells (e.g., human) may be used. Cells may also be hematopoietic stem/and progenitor cells (HPSCs) obtained from a subject or individual, such as from tissue biopsy, surgery, blood, plasma, serum, or other biological fluid. Such cells may be relevant to the eventual cell target. In embodiments, the HSPC cells are human CD34⁺ hematopoietic stem/progenitor cells (HPSCs).

[0656] Delivery may be performed using a viral vector. In one embodiment, transfection may be performed using lipid transfection (such as Lipofectamine or Fugene) or by electroporation. Following transfection, expression of a reporter (e.g., GFP) can be determined either by fluorescence microscopy or by flow cytometry to confirm consistent and high levels of transfection. These preliminary transfections can comprise different nucleobase editors to determine which combinations of editors give the greatest activity. The system can comprise one or more different vectors. In one embodiment, the base editor is codon optimized for expression of the desired cell type, preferentially a eukaryotic cell, preferably a mammalian cell or a human cell.

[0657] The activity of the nucleobase editor is assessed as described herein, i.e., by sequencing the genome of the cells to detect alterations in a target sequence. For Sanger sequencing, purified PCR amplicons are cloned into a plasmid backbone, transformed, miniprepped and sequenced with a single primer. Sequencing may also be performed using next generation sequencing (NGS) techniques. When using next generation sequencing, amplicons may be 300-500 bp with the intended cut site placed asymmetrically. Following PCR, next generation sequencing adapters and barcodes (for example Illumina multiplex adapters and indexes) may be added to the ends of the amplicon, e.g., for use in high throughput sequencing (for example on an Illumina MiSeq). The fusion proteins that induce the greatest levels of target specific alterations in initial tests can be selected for further evaluation.

[0658] In particular embodiments, the nucleobase editors are used to target polynucleotides of interest. In one embodiment, a nucleobase editor of the invention is delivered to cells (e.g., hematopoietic stem/and progenitor cells (HPSCs)) in conjunction with one or more guide RNAs that are used to target one or more nucleic acid sequences of interest within the genome of a cell, thereby altering the target gene(s) (e.g., hematopoietic stem/and progenitor cells (HPSCs)). In some embodiments, a base editor is targeted by one or more guide RNAs to introduce one or more edits to the sequence of one or more target sequences of interest (e.g., the hemoglobin beta subunit (HbB) gene or a promoter region of an HBG1/2 gene). In some embodiments, the one or more edits to the sequence of one or more genes of interest decrease or eliminate expression of the protein encoded by the gene in the host cell (e.g., hematopoietic stem/and progenitor cells (HPSCs)). In some embodiments, expression of one or more proteins encoded by one or more target sequences of interest (e.g., the hemoglobin beta subunit (HbB) gene or a promoter region of an HBG1/2 gene) is completely knocked out or eliminated in the host cell ((e.g., hematopoietic stem/and progenitor cells (HPSCs)).

[0659] In some embodiments, the host cell is a mammalian cell. In some embodiments, the host cell is a human cell.

### Nucleic Acid-Based Delivery of Base Editor Systems

[0660] Nucleic acid molecules encoding a base editor system according to the present disclosure can be administered to subjects or delivered into cells in vitro or in vivo by art-known methods or as described herein. For example, a base editor system comprising a deaminase (e.g., cytidine or adenine deaminase) can be delivered by vectors (e.g., viral or non-viral vectors), or by naked DNA, DNA complexes, lipid nanoparticles, or a combination of the aforementioned compositions.

[0661] Any RNA of the systems, for example a guide RNA or a base editor-encoding mRNA, can be delivered in the form of RNA. Base editor-encoding mRNA can be generated using in vitro transcription. For example, nuclease mRNA can be synthesized using a PCR cassette containing the following elements: T7 promoter, optional kozak sequence (GCCACC), nuclease sequence, and 3′ UTR such as a 3′ UTR from beta globin-polyA tail. The cassette can be used for transcription by T7 polymerase. Guide polynucleotides (e.g., gRNA) can also be transcribed using in vitro transcription from a cassette containing a T7 promoter, followed by the sequence “GG”, and guide polynucleotide sequence.

[0662] To enhance expression and reduce possible toxicity (e.g., immunogenicity), the base editor-coding sequence and/or the guide nucleic acid can be modified to include one or more modified nucleosides e.g. using pseudo-U or 5-Methyl-C. In some embodiments, the base editor-coding sequence and/or the guid nucleic acid contains one or more chemically modified nucleobases, such as 2′-O-methyl (2′-OMe), 2′-deoxy (2′-H), 2′-O-C1-3alkyl-O-C1-3alkyl such as 2′-methoxyethyl (“2′-MOE”),2′-fluoro (“2′-F”), 2′-amino (“2′—NH2”), 2′-arabinosyl (“2′-arabino”) nucleotide, 2′-F-arabinosyl (“2′-F-arabino”) nucleotide, 2′-locked nucleic acid (“LNA”) nucleotide, 2′-unlocked nucleic acid (“ULNA”) nucleotide, a sugar in L form (“L-sugar”), 4′-thioribosyl nucleotide, or any chemical modification as described herein. In some embodiments, the base editor-coding sequence and/or the guid nucleic acid contains an internucleotide linkage modification such as phosphorothioate “P(S)” (P(S)), phosphonocarboxylate (P(CH2)nCOOR) such as phosphonoacetate “PACE” (P(CH2COO—)), thiophosphonocarboxylate ((S)P(CH2)nCOOR) such as thiophosphonoacetate “thioPACE” ((S)P(CH2)nCOO—)), alkylphosphonate (P(C1-3alkyl) such as methylphosphonate-P(CH3), boranophosphonate (P(BH3)), and phosphorodithioate (P(S)2). In some embodiments, the base editor-coding sequence and/or the guid nucleic acid contains a nucleobase chemical modification such as 2-thiouracil (“2-thioU”), 2-thiocytosine (“2-thioC”), 4-thiouracil (“4-thioU”), 6-thioguanine (“6-thioG”), 2-aminoadenine (“2-aminoA”), 2-aminopurine, pseudouracil, hypoxanthine, 7-deazaguanine, 7-deaza-8-azaguanine, 7-deazaadenine, 7-deaza-8-azaadenine, 5-methylcytosine (“5-methylC”), 5-methyluracil (“5-methylU”), 5-hydroxymethylcytosine, 5-hydroxymethyluracil, 5,6-dehydrouracil, 5-propynylcytosine, 5-propynyluracil, 5-ethynylcytosine, 5-ethynyluracil, 5-allyluracil (“5-allylU”), 5-allylcytosine (“5-allylC”), 5-aminoallyluracil (“5-aminoallylU”), 5-aminoallyl-cytosine (“5-aminoallylC”), an abasic nucleotide, Z base, P base, Unstructured Nucleic Acid (“UNA”), isoguanine (“isoG”), isocytosine (“isoC”). In some embodiments, the base editor-coding sequence and/or the guid nucleic acid contains one or more isotopic modifications on the nucleotide sugar, the nucleobase, the phosphodiester linkage and/or the nucleotide phosphates. Such modifications include nucleotides comprising one or more 15N, 13C, 14C, Deuterium, 3H, 32P, 125I, 131I atoms or other atoms or elements thereof. In various embodiments, the modified nucleobase(s) reduce toxicity (e.g., immunogenicity) and/or stability (e.g., increase serum half-life) of the base editor-coding sequence (e.g., mRNA) and/or the guide nucleic acid.

[0663] Nanoparticles, which can be organic or inorganic, are useful for delivering a base editor system or component thereof. Nanoparticles are well known in the art and any suitable nanoparticle can be used to deliver a base editor system or component thereof, or a nucleic acid molecule encoding such components. In one example, organic (e.g. lipid and/or polymer) nanoparticles are suitable for use as delivery vehicles in certain embodiments of this disclosure. Exemplary lipids for use in nanoparticle formulations, and/or gene transfer are shown in Table 17 (below).

TABLE 17
Lipids Used for Gene Transfer

| Lipid | Abbreviation | Feature |
|---|---|---|
| 1,2-Dioleoyl-sn-glycero-3-phosphatidylcholine | DOPC | Helper |
| 1,2-Dioleoyl-sn-glycero-3-phosphatidylethanolamine | DOPE | Helper |
| Cholesterol | | Helper |
| N-[1-(2,3-Dioleyloxy)prophyl]N,N,N-trimethylammonium | DOTMA | Cationic |
| chloride | | |
| 1,2-Dioleoyloxy-3-trimethylammonium-propane | DOTAP | Cationic |
| Dioctadecylamidoglycylspermine | DOGS | Cationic |
| N-(3-Aminopropyl)-N,N-dimethyl-2,3-bis(dodecyloxy)-1- | GAP-DLRIE | Cationic |
| propanaminium bromide | | |
| Cetyltrimethylammonium bromide | CTAB | Cationic |
| 6-Lauroxyhexyl ornithinate | LHON | Cationic |
| 1-(2,3-Dioleoyloxypropyl)-2,4,6-trimethylpyridinium | 2Oc | Cationic |
| 2,3-Dioleyloxy-N-[2(sperminecarboxamido-ethyl]-N,N- | DOSPA | Cationic |
| dimethyl-1-propanaminium trifluoroacetate | | |
| 1,2-Dioleyl-3-trimethylammonium-propane | DOPA | Cationic |
| N-(2-Hydroxyethyl)-N,N-dimethyl-2,3-bis(tetradecyloxy)-1- | MDRIE | Cationic |
| propanaminium bromide | | |
| Dimyristooxypropyl dimethyl hydroxyethyl ammonium bromide | DMRI | Cationic |
| 3β-[N-(N′,N′-Dimethylaminoethane)-carbamoyl]cholesterol | DC-Chol | Cationic |
| Bis-guanidium-tren-cholesterol | BGTC | Cationic |
| 1,3-Diodeoxy-2-(6-carboxy-spermyl)-propylamide | DOSPER | Cationic |
| Dimethyloctadecylammonium bromide | DDAB | Cationic |
| Dioctadecylamidoglicylspermidin | DSL | Cationic |
| rac-[(2,3-Dioctadecyloxypropyl)(2-hydroxyethyl)]- | CLIP-1 | Cationic |
| dimethylammonium chloride | | |
| rac-[2(2,3-Dihexadecyloxypropyl- | CLIP-6 | Cationic |
| oxymethyloxy)ethyl]trimethylammoniun bromide | | |
| Ethyldimyristoylphosphatidylcholine | EDMPC | Cationic |
| 1,2-Distearyloxy-N,N-dimethyl-3-aminopropane | DSDMA | Cationic |
| 1,2-Dimyristoyl-trimethylammonium propane | DMTAP | Cationic |
| O,O′-Dimyristyl-N-lysyl aspartate | DMKE | Cationic |
| 1,2-Distearoyl-sn-glycero-3-ethylpho sphocholine | DSEPC | Cationic |
| N-Palmitoyl D-erythro-sphingosyl carbamoyl-spermine | CCS | Cationic |
| N-t-Butyl-N0-tetradecyl-3-tetradecylaminopropionamidine | diC14-amidine | Cationic |
| Octadecenolyoxy[ethyl-2-heptadecenyl-3 hydroxyethyl] | DOTIM | Cationic |
| imidazolinium chloride | | |
| N1-Cholesteryloxycarbonyl-3,7-diazanonane-1,9-diamine | CDAN | Cationic |
| 2-(3-[Bis(3-amino-propyl)-amino]propylamino)-N- | RPR209120 | Cationic |
| ditetradecylcarbamoylme-ethyl-acetamide | | |
| 1,2-dilinoleyloxy-3-dimethylaminopropane | DLinDMA | Cationic |
| 2,2-dilinoleyl-4-dimethylaminoethyl-[1,3]-dioxolane | DLin-KC2- | Cationic |
| | DMA | |
| dilinoleyl-methyl-4-dimethylaminobutyrate | DLin-MC3- | Cationic |
| | DMA | |

[0664] Table 18 lists exemplary polymers for use in gene transfer and/or nanoparticle formulations.

TABLE 18
Polymers Used for Gene Transfer

| Polymer | Abbreviation |
|---|---|
| Poly(ethylene)glycol | PEG |
| Polyethylenimine | PEI |
| Dithiobis (succinimidylpropionate) | DSP |
| Dimethyl-3,3′-dithiobispropionimidate | DTBP |
| Poly(ethylene imine)biscarbamate | PEIC |
| Poly (L-lysine) | PLL |
| Histidine modified PLL | |
| Poly(N-vinylpyrrolidone) | PVP |
| Poly(propylenimine) | PPI |
| Poly(amidoamine) | PAMAM |
| Poly(amidoethylenimine) | SS-PAEI |
| Triethylenetetramine | TETA |
| Poly(β-aminoester) | |
| Poly(4-bydroxy-L-proline ester) | PHP |
| Poly(allylamine) | |
| Poly(α-[4-aminobutyl]-L-glycolic acid) | PAGA |
| Poly(D,L-lactic-co-glycolic acid) | PLGA |
| Poly(N-ethyl-4-vinylpyridinium bromide) | |
| Poly(phosphazene)s | PPZ |
| Poly(phosphoester)s | PPE |
| Poly(phosphoramidate)s | PPA |
| Poly(N-2-hydroxypropylmethacrylamide) | pHPMA |
| Poly(2-(dimethylamino)ethyl methacrylate) | pDMAEMA |
| Poly(2-aminoethyl propylene phosphate) | PPE-EA |
| Chitosan | |
| Galactosylated chitosan | |
| N-Dodacylated chitosan | |
| Histone | |
| Collagen | |
| Dextran-spermine | D-SPM |

[0665] Table 19 summarizes delivery methods for a polynucleotide encoding a fusion protein described herein.

TABLE 19

| | | Delivery into | | | Type of |
|---|---|---|---|---|---|
| | | Non-Dividing | Duration of | Genome | Molecule |
| Delivery | Vector/Mode | Cells | Expression | Integration | Delivered |
| Physical | (e.g., | YES | Transient | NO | Nucleic Acids |
| | electroporation, | | | | and Proteins |
| | particle gun, | | | | |
| | Calcium | | | | |
| | Phosphate | | | | |
| | transfection | | | | |
| Viral | Retrovirus | NO | Stable | YES | RNA |
| | Lentivirus | YES | Stable | YES/NO with | RNA |
| | | | | modification | |
| | Adenovirus | YES | Transient | NO | DNA |
| | Adeno- | YES | Stable | NO | DNA |
| | Associated | | | | |
| | Virus (AAV) | | | | |
| | Vaccinia Virus | YES | Very | NO | DNA |
| | | | Transient | | |
| | Herpes Simplex | YES | Stable | NO | DNA |
| | Virus | | | | |
| Non-Viral | Cationic | YES | Transient | Depends on | Nucleic Acids |
| | Liposomes | | | what is | and Proteins |
| | | | | delivered | |
| | Polymeric | YES | Transient | Depends on | Nucleic Acids |
| | Nanoparticles | | | what is | and Proteins |
| | | | | delivered | |
| Biological | Attenuated | YES | Transient | NO | Nucleic Acids |
| Non-Viral | Bacteria | | | | |
| Delivery | Engineered | YES | Transient | NO | Nucleic Acids |
| Vehicles | Bacteriophages | | | | |
| | Mammalian | YES | Transient | NO | Nucleic Acids |
| | Virus-like | | | | |
| | Particles | | | | |
| | Biological | YES | Transient | NO | Nucleic Acids |
| | liposomes: | | | | |
| | Erythrocyte | | | | |
| | Ghosts and | | | | |
| | Exosomes | | | | |

[0666] In another aspect, the delivery of base editor system components or nucleic acids encoding such components, for example, a polynucleotide programmable nucleotide binding domain (e.g., Cas9) such as, for example, Cas9 or variants thereof, and a gRNA targeting a nucleic acid sequence of interest, may be accomplished by delivering a ribonucleoprotein (RNP) to cells. In general, a ribonucleoprotein (RNP) is a complex of ribonucleic acid and RNA-binding protein. The RNP comprises a polynucleotide programmable nucleotide binding domain (e.g., Cas9), in complex with the targeting gRNA. RNPs or polynucleotides described herein may be delivered to cells using known methods, such as electroporation, nucleofection, or cationic lipid-mediated methods, for example, as reported by Zuris, J. A. et al., 2015, Nat. Biotechnology, 33(1):73-80, which is incorporated by reference in its entirety. RNPs are advantageous for use in CRISPR base editing systems, particularly for cells that are difficult to transfect, such as primary cells. In addition, RNPs can also alleviate difficulties that may occur with protein expression in cells, especially when eukaryotic promoters, e.g., CMV or EF1A, which may be used in CRISPR plasmids, are not well-expressed. Advantageously, the use of RNPs does not require the delivery of foreign DNA into cells. Moreover, because an RNP comprising a nucleic acid binding protein and gRNA complex is degraded over time, the use of RNPs has the potential to limit off-target effects. In a manner similar to that for plasmid based techniques, RNPs can be used to deliver binding protein (e.g., Cas9 variants) and to direct homology directed repair (HDR).

[0667] Nucleic acid molecules encoding a base editor system can be delivered directly to cells (e.g., hematopoietic stem/progenitor cells) as naked DNA or RNA by means of transfection or electroporation, for example, or can be conjugated to molecules (e.g., N-acetylgalactosamine) promoting uptake by the target cells. Vectors encoding base editor systems and/or their components can also be used. In particular embodiments, a polynucleotide, e.g. a mRNA encoding a base editor system or a functional component thereof, may be co-electroporated with one or more guide RNAs as described herein.

[0668] Nucleic acid vectors can comprise one or more sequences encoding a domain of a fusion protein described herein. A vector can also encode a protein component of a base editor system operably linked to a nuclear localization signal, nucleolar localization signal, or mitochondrial localization signal. As one example, a vector can include a Cas9 coding sequence that includes one or more nuclear localization sequences (e.g., a nuclear localization sequence from SV40), and one or more deaminases.

[0669] The vector can also include any suitable number of regulatory/control elements, e.g., promoters, enhancers, introns, polyadenylation signals, Kozak consensus sequences, or internal ribosome entry sites (IRES). These elements are well known in the art.

[0670] Vectors according to this disclosure include recombinant viral vectors. Exemplary viral vectors are set forth herein above. Other viral vectors known in the art can also be used. In addition, viral particles can be used to deliver base editor system components in nucleic acid and/or protein form. For example, “empty” viral particles can be assembled to contain a base editor system or component as cargo. Viral vectors and viral particles can also be engineered to incorporate targeting ligands to alter target tissue specificity.

[0671] Vectors described herein may comprise regulatory elements to drive expression of a base editor system or component thereof. Such vectors include adeno-associated viruses with inverted long terminal repeats (AAV ITR). The use of AAV-ITR can be advantageous for eliminating the need for an additional promoter element, which can take up space in the vector. The additional space freed up can be used to drive the expression of additional elements, such as a guide nucleic acid or a selectable marker. ITR activity can be used to reduce potential toxicity due to over expression.

[0672] Any suitable promoter can be used to drive expression of a base editor system or component thereof and, where appropriate, the guide nucleic acid. For ubiquitous expression, promoters include CMV, CAG, CBh, PGK, SV40, Ferritin heavy or light chains. For brain or other CNS cell expression, suitable promoters include: SynapsinI for all neurons, CaMKIIalpha for excitatory neurons, GAD67 or GAD65 or VGAT for GABAergic neurons. For liver cell expression, suitable promoters include the Albumin promoter. For lung cell expression, suitable promoters include SP-B. For endothelial cells, suitable promoters include ICAM. For hematopoietic cell expression suitable promoters include IFNbeta or CD45. For osteoblast expression suitable promoters can include OG-2.

[0673] In some embodiments, a base editor system of the present disclosure is of small enough size to allow separate promoters to drive expression of the base editor and a compatible guide nucleic acid within the same nucleic acid molecule. For instance, a vector or viral vector can comprise a first promoter operably linked to a nucleic acid encoding the base editor and a second promoter operably linked to the guide nucleic acid.

[0674] The promoter used to drive expression of a guide nucleic acid can include: Pol III promoters, such as U6 or H1 Use of Pol II promoter and intronic cassettes to express gRNA Adeno Associated Virus (AAV).

[0675] In particular embodiments, a fusion protein of the invention is encoded by a polynucleotide present in a viral vector (e.g., adeno-associated virus (AAV), AAV3, AAV3b, AAV4, AAV5, AAV6, AAV7, AAV8, AAV9, AAVrh8, AAV10, and variants thereof), or a suitable capsid protein of any viral vector. Thus, in some aspects, the disclosure relates to the viral delivery of a fusion protein. Examples of viral vectors include retroviral vectors (e.g. Maloney murine leukemia virus, MML-V), adenoviral vectors (e.g. AD100), lentiviral vectors (HIV and FIV-based vectors), herpesvirus vectors (e.g. HSV-2).

[0676] In some aspects, the methods described herein for editing specific genes in a cell can be used to genetically modify the cell (e.g., a hematopoietic stem/progenitor cell (HPSCs)).

### Viral Vectors

[0677] A base editor described herein can therefore be delivered with viral vectors. In some embodiments, a base editor disclosed herein can be encoded on a nucleic acid that is contained in a viral vector. In some embodiments, one or more components of the base editor system can be encoded on one or more viral vectors. For example, a base editor and guide nucleic acid can be encoded on a single viral vector. In other embodiments, the base editor and guide nucleic acid are encoded on different viral vectors. In either case, the base editor and guide nucleic acid can each be operably linked to a promoter and terminator. The combination of components encoded on a viral vector can be determined by the cargo size constraints of the chosen viral vector.

[0678] The use of RNA or DNA viral based systems for the delivery of a base editor takes advantage of highly evolved processes for targeting a virus to specific cells in culture or in the host and trafficking the viral payload to the nucleus or host cell genome. Viral vectors can be administered directly to cells in culture, patients (in vivo), or they can be used to treat cells in vitro, and the modified cells can optionally be administered to patients (ex vivo). Conventional viral based systems could include retroviral, lentivirus, adenoviral, adeno-associated and herpes simplex virus vectors for gene transfer. Integration in the host genome is possible with the retrovirus, lentivirus, and adeno-associated virus gene transfer methods, often resulting in long term expression of the inserted transgene. Additionally, high transduction efficiencies have been observed in many different cell types and target tissues.

[0679] Viral vectors can include lentivirus (e.g., HIV and FIV-based vectors), Adenovirus (e.g., AD100), Retrovirus (e.g., Maloney murine leukemia virus, MML-V), herpesvirus vectors (e.g., HSV-2), and Adeno-associated viruses (AAVs), or other plasmid or viral vector types, in particular, using formulations and doses from, for example, U.S. Pat. No. 8,454,972 (formulations, doses for adenovirus), U.S. Pat. No. 8,404,658 (formulations, doses for AAV) and U.S. Pat. No. 5,846,946 (formulations, doses for DNA plasmids) and from clinical trials and publications regarding the clinical trials involving lentivirus, AAV and adenovirus. For example, for AAV, the route of administration, formulation and dose can be as in U.S. Pat. No. 8,454,972 and as in clinical trials involving AAV. For Adenovirus, the route of administration, formulation and dose can be as in U.S. Pat. No. 8,404,658 and as in clinical trials involving adenovirus. For plasmid delivery, the route of administration, formulation and dose can be as in U.S. Pat. No. 5,846,946 and as in clinical studies involving plasmids. Doses can be based on or extrapolated to an average 70 kg individual (e.g. a male adult human), and can be adjusted for patients, subjects, mammals of different weight and species. Frequency of administration is within the ambit of the medical or veterinary practitioner (e.g., physician, veterinarian), depending on usual factors including the age, sex, general health, other conditions of the patient or subject and the particular condition or symptoms being addressed. The viral vectors can be injected into the tissue of interest. For cell-type specific base editing, the expression of the base editor and optional guide nucleic acid can be driven by a cell-type specific promoter.

[0680] The tropism of a retrovirus can be altered by incorporating foreign envelope proteins, expanding the potential target population of target cells. Lentiviral vectors are retroviral vectors that are able to transduce or infect non-dividing cells and typically produce high viral titers. Selection of a retroviral gene transfer system would therefore depend on the target tissue. Retroviral vectors are comprised of cis-acting long terminal repeats with packaging capacity for up to 6-10 kb of foreign sequence. The minimum cis-acting LTRs are sufficient for replication and packaging of the vectors, which are then used to integrate the therapeutic gene into the target cell to provide permanent transgene expression. Widely used retroviral vectors include those based upon murine leukemia virus (MuLV), gibbon ape leukemia virus (GaLV), Simian Immuno deficiency virus (SIV), human immuno deficiency virus (HIV), and combinations thereof (See, e.g., Buchscher et al., J. Virol. 66:2731-2739 (1992); Johann et al., J. Virol. 66:1635-1640 (1992); Sommnerfelt et al., Virol. 176:58-59 (1990); Wilson et al., J. Virol. 63:2374-2378 (1989); Miller et al., J. Virol. 65:2220-2224 (1991); PCT/US94/05700).

[0681] Retroviral vectors, especially lentiviral vectors, can require polynucleotide sequences smaller than a given length for efficient integration into a target cell. For example, retroviral vectors of length greater than 9 kb can result in low viral titers compared with those of smaller size. In some aspects, a base editor of the present disclosure is of sufficient size so as to enable efficient packaging and delivery into a target cell via a retroviral vector. In some embodiments, a base editor is of a size so as to allow efficient packing and delivery even when expressed together with a guide nucleic acid and/or other components of a targetable nuclease system.

[0682] Packaging cells are typically used to form virus particles that are capable of infecting a host cell. Such cells include 293 cells, which package adenovirus, and psi.2 cells or PA317 cells, which package retrovirus. Viral vectors used in gene therapy are usually generated by producing a cell line that packages a nucleic acid vector into a viral particle. The vectors typically contain the minimal viral sequences required for packaging and subsequent integration into a host, other viral sequences being replaced by an expression cassette for the polynucleotide(s) to be expressed. The missing viral functions are typically supplied in trans by the packaging cell line. For example, Adeno-associated virus (“AAV”) vectors used in gene therapy typically only possess ITR sequences from the AAV genome which are required for packaging and integration into the host genome. Viral DNA can be packaged in a cell line, which contains a helper plasmid encoding the other AAV genes, namely rep and cap, but lacking ITR sequences. The cell line can also be infected with adenovirus as a helper. The helper virus can promote replication of the AAV vector and expression of AAV genes from the helper plasmid. The helper plasmid in some cases is not packaged in significant amounts due to a lack of ITR sequences. Contamination with adenovirus can be reduced by, e.g., heat treatment to which adenovirus is more sensitive than AAV.

[0683] In applications where transient expression is preferred, adenoviral based systems can be used. Adenoviral based vectors are capable of very high transduction efficiency in many cell types and do not require cell division. With such vectors, high titer and levels of expression have been obtained. This vector can be produced in large quantities in a relatively simple system. Adeno-associated virus (“AAV”) vectors can also be used to transduce cells with target nucleic acids, e.g., in the in vitro production of nucleic acids and peptides, and for in vivo and ex vivo gene therapy procedures (See, e.g., West et al., Virology 160:38-47 (1987); U.S. Pat. No. 4,797,368; WO 93/24641; Kotin, Human Gene Therapy 5:793-801 (1994); Muzyczka, J. Clin. Invest. 94:1351 (1994). The construction of recombinant AAV vectors is described in a number of publications, including U.S. Pat. No. 5,173,414; Tratschin et al., Mol. Cell. Biol. 5:3251-3260 (1985); Tratschin, et al., Mol. Cell. Biol. 4:2072-2081 (1984); Hermonat & Muzyczka, PNAS 81:6466-6470 (1984); and Samulski et al., J. Virol. 63:03822-3828 (1989).

[0684] AAV is a small, single-stranded DNA dependent virus belonging to the parvovirus family. The 4.7 kb wild-type (wt) AAV genome is made up of two genes that encode four replication proteins and three capsid proteins, respectively, and is flanked on either side by 145-bp inverted terminal repeats (ITRs). The virion is composed of three capsid proteins, Vp1, Vp2, and Vp3, produced in a 1:1:10 ratio from the same open reading frame but from differential splicing (Vp1) and alternative translational start sites (Vp2 and Vp3, respectively). Vp3 is the most abundant subunit in the virion and participates in receptor recognition at the cell surface defining the tropism of the virus. A phospholipase domain, which functions in viral infectivity, has been identified in the unique N terminus of Vp1.

[0685] Similar to wt AAV, recombinant AAV (rAAV) utilizes the cis-acting 145-bp ITRs to flank vector transgene cassettes, providing up to 4.5 kb for packaging of foreign DNA. Subsequent to infection, rAAV can express a fusion protein of the invention and persist without integration into the host genome by existing episomally in circular head-to-tail concatemers. Although there are numerous examples of rAAV success using this system, in vitro and in vivo, the limited packaging capacity has limited the use of AAV-mediated gene delivery when the length of the coding sequence of the gene is equal or greater in size than the wt AAV genome.

[0686] Viral vectors can be selected based on the application. For example, for in vivo gene delivery, AAV can be advantageous over other viral vectors. In some embodiments, AAV allows low toxicity, which can be due to the purification method not requiring ultra-centrifugation of cell particles that can activate the immune response. In some embodiments, AAV allows low probability of causing insertional mutagenesis because it doesn't integrate into the host genome. Adenoviruses are commonly used as vaccines because of the strong immunogenic response they induce. Packaging capacity of the viral vectors can limit the size of the base editor that can be packaged into the vector.

[0687] AAV has a packaging capacity of about 4.5 Kb or 4.75 Kb including two 145 base inverted terminal repeats (ITRs). This means disclosed base editor as well as a promoter and transcription terminator can fit into a single viral vector. Constructs larger than 4.5 or 4.75 Kb can lead to significantly reduced virus production. For example, SpCas9 is quite large, the gene itself is over 4.1 Kb, which makes it difficult for packing into AAV. Therefore, embodiments of the present disclosure include utilizing a disclosed base editor which is shorter in length than conventional base editors. In some examples, the base editors are less than 4 kb. Disclosed base editors can be less than 4.5 kb, 4.4 kb, 4.3 kb, 4.2 kb, 4.1 kb, 4 kb, 3.9 kb, 3.8 kb, 3.7 kb, 3.6 kb, 3.5 kb, 3.4 kb, 3.3 kb, 3.2 kb, 3.1 kb, 3 kb, 2.9 kb, 2.8 kb, 2.7 kb, 2.6 kb, 2.5 kb, 2 kb, or 1.5 kb. In some embodiments, the disclosed base editors are 4.5 kb or less in length.

[0688] An AAV can be AAV1, AAV2, AAV5 or any combination thereof. One can select the type of AAV with regard to the cells to be targeted; e.g., one can select AAV serotypes 1, 2, 5 or a hybrid capsid AAV1, AAV2, AAV5 or any combination thereof for targeting brain or neuronal cells; and one can select AAV4 for targeting cardiac tissue. AAV8 is useful for delivery to the liver. A tabulation of certain AAV serotypes as to these cells can be found in Grimm, D. et al, J. Virol. 82: 5887-5911 (2008)).

[0689] In some embodiments, lentiviral vectors are used to transduce a cell of interest with a polynucleotide encoding a base editor system. Lentiviruses are complex retroviruses that have the ability to infect and express their genes in both mitotic and post-mitotic cells. The most commonly known lentivirus is the human immunodeficiency virus (HIV), which uses the envelope glycoproteins of other viruses to target a broad range of cell types.

[0690] Lentiviruses can be prepared as follows. After cloning pCasES10 (which contains a lentiviral transfer plasmid backbone), HEK293FT at low passage (p=5) were seeded in a T-75 flask to 50% confluence the day before transfection in DMEM with 10% fetal bovine serum and without antibiotics. After 20 hours, media is changed to OptiMEM (serum-free) media and transfection was done 4 hours later. Cells are transfected with 10 μg of lentiviral transfer plasmid (pCasES10) and the following packaging plasmids: 5 μg of pMD2.G (VSV-g pseudotype), and 7.5 μg of psPAX2 (gag/pol/rev/tat). Transfection can be done in 4 mL OptiMEM with a cationic lipid delivery agent (50 μl Lipofectamine 2000 and 100 μl Plus reagent). After 6 hours, the media is changed to antibiotic-free DMEM with 10% fetal bovine serum. These methods use serum during cell culture, but serum-free methods are preferred.

[0691] Lentivirus can be purified as follows. Viral supernatants are harvested after 48 hours. Supernatants are first cleared of debris and filtered through a 0.45 μm low protein binding (PVDF) filter. They are then spun in an ultracentrifuge for 2 hours at 24,000 rpm. Viral pellets are resuspended in 50 μl of DMEM overnight at 4° C. They are then aliquoted and immediately frozen at −80° C.

[0692] In another embodiment, minimal non-primate lentiviral vectors based on the equine infectious anemia virus (EIAV) are also contemplated. In another embodiment, RetinoStat®, an equine infectious anemia virus-based lentiviral gene therapy vector that expresses angiostatic proteins endostatin and angiostatin that is contemplated to be delivered via a subretinal injection. In another embodiment, use of self-inactivating lentiviral vectors are contemplated.

[0693] The small packaging capacity of AAV vectors makes the delivery of a number of genes that exceed this size and/or the use of large physiological regulatory elements challenging. These challenges can be addressed, for example, by dividing the protein(s) to be delivered into two or more fragments, wherein the N-terminal fragment is fused to a split intein-N and the C-terminal fragment is fused to a split intein-C. These fragments are then packaged into two or more AAV vectors. As used herein, “intein” refers to a self-splicing protein intron (e.g., peptide) that ligates flanking N-terminal and C-terminal exteins (e.g., fragments to be joined). The use of certain inteins for joining heterologous protein fragments is described, for example, in Wood et al., J. Biol. Chem. 289(21): 14512-9 (2014). For example, when fused to separate protein fragments, the inteins IntN and IntC recognize each other, splice themselves out and simultaneously ligate the flanking N- and C-terminal exteins of the protein fragments to which they were fused, thereby reconstituting a full-length protein from the two protein fragments. Other suitable inteins will be apparent to a person of skill in the art.

[0694] A fragment of a fusion protein of the invention can vary in length. In some embodiments, a protein fragment ranges from 2 amino acids to about 1000 amino acids in length. In some embodiments, a protein fragment ranges from about 5 amino acids to about 500 amino acids in length. In some embodiments, a protein fragment ranges from about 20 amino acids to about 200 amino acids in length. In some embodiments, a protein fragment ranges from about 10 amino acids to about 100 amino acids in length. Suitable protein fragments of other lengths will be apparent to a person of skill in the art.

[0695] In one embodiment, dual AAV vectors are generated by splitting a large transgene expression cassette in two separate halves (5′ and 3′ ends, or head and tail), where each half of the cassette is packaged in a single AAV vector (of <5 kb). The re-assembly of the full-length transgene expression cassette is then achieved upon co-infection of the same cell by both dual AAV vectors followed by: (1) homologous recombination (HR) between 5′ and 3′ genomes (dual AAV overlapping vectors); (2) ITR-mediated tail-to-head concatemerization of 5′ and 3′ genomes (dual AAV trans-splicing vectors); or (3) a combination of these two mechanisms (dual AAV hybrid vectors). The use of dual AAV vectors in vivo results in the expression of full-length proteins. The use of the dual AAV vector platform represents an efficient and viable gene transfer strategy for transgenes of >4.7 kb in size.

### Inteins

[0696] Inteins (intervening protein) are auto-processing domains found in a variety of diverse organisms, which carry out a process known as protein splicing. Protein splicing is a multi-step biochemical reaction comprised of both the cleavage and formation of peptide bonds. While the endogenous substrates of protein splicing are proteins found in intein-containing organisms, inteins can also be used to chemically manipulate virtually any polypeptide backbone.

[0697] In protein splicing, the intein excises itself out of a precursor polypeptide by cleaving two peptide bonds, thereby ligating the flanking extein (external protein) sequences via the formation of a new peptide bond. This rearrangement occurs post-translationally (or possibly co-translationally). Intein-mediated protein splicing occurs spontaneously, requiring only the folding of the intein domain.

[0698] About 5% of inteins are split inteins, which are transcribed and translated as two separate polypeptides, the N-intein and C-intein, each fused to one extein. Upon translation, the intein fragments spontaneously and non-covalently assemble into the canonical intein structure to carry out protein splicing in trans. The mechanism of protein splicing entails a series of acyl-transfer reactions that result in the cleavage of two peptide bonds at the intein-extein junctions and the formation of a new peptide bond between the N- and C-exteins. This process is initiated by activation of the peptide bond joining the N-extein and the N-terminus of the intein. Virtually all inteins have a cysteine or serine at their N-terminus that attacks the carbonyl carbon of the C-terminal N-extein residue. This N to O/S acyl-shift is facilitated by a conserved threonine and histidine (referred to as the TXXH motif (SEQ ID NO: 288)), along with a commonly found aspartate, which results in the formation of a linear (thio)ester intermediate. Next, this intermediate is subject to trans-(thio)esterification by nucleophilic attack of the first C-extein residue (+1), which is a cysteine, serine, or threonine. The resulting branched (thio)ester intermediate is resolved through a unique transformation: cyclization of the highly conserved C-terminal asparagine of the intein. This process is facilitated by the histidine (found in a highly conserved HNF motif) and the penultimate histidine and may also involve the aspartate. This succinimide formation reaction excises the intein from the reactive complex and leaves behind the exteins attached through a non-peptidic linkage. This structure rapidly rearranges into a stable peptide bond in an intein-independent fashion.

[0699] In some embodiments, a portion or fragment of a nuclease (e.g., Cas9) is fused to an intein. The nuclease can be fused to the N-terminus or the C-terminus of the intein. In some embodiments, a portion or fragment of a fusion protein is fused to an intein and fused to an AAV capsid protein. The intein, nuclease and capsid protein can be fused together in any arrangement (e.g., nuclease-intein-capsid, intein-nuclease-capsid, capsid-intein-nuclease, etc.). In some embodiments, an N-terminal fragment of a base editor (e.g., ABE, CBE) is fused to a split intein-N and a C-terminal fragment is fused to a split intein-C. These fragments are then packaged into two or more AAV vectors. In some embodiments, the N-terminus of an intein is fused to the C-terminus of a fusion protein and the C-terminus of the intein is fused to the N-terminus of an AAV capsid protein.

[0700] In one embodiment, inteins are utilized to join fragments or portions of a cytidine or adenosine deaminase base editor protein that is grafted onto an AAV capsid protein. The use of certain inteins for joining heterologous protein fragments is described, for example, in Wood et al., J. Biol. Chem. 289(21); 14512-9 (2014). For example, when fused to separate protein fragments, the inteins IntN and IntC recognize each other, splice themselves out and simultaneously ligate the flanking N- and C-terminal exteins of the protein fragments to which they were fused, thereby reconstituting a full-length protein from the two protein fragments. Other suitable inteins will be apparent to a person of skill in the art.

[0701] In some embodiments, an ABE was split into N- and C-terminal fragments at Ala, Ser, Thr, or Cys residues within selected regions of SpCas9. These regions correspond to loop regions identified by Cas9 crystal structure analysis.

[0702] The N-terminus of each fragment is fused to an intein-N and the C-terminus of each fragment is fused to an intein C at amino acid positions S303, T310, T313, S355, A456, S460, A463, T466, S469, T472, T474, C574, S577, A589, and S590, which are indicated in capital letters in the sequence below (called the “Cas9 reference sequence”).

| (SEQ ID NO: 158) | | | | | | |
|---|---|---|---|---|---|---|
| 1 | mdkkysigld | lgtnsvqwav | itdeykvpsk | kfkvlgntdr | hsikkniiga | llfdsqetae |
| 61 | atrlkrtarr | rytrrknric | ylqeifsnem | akvddsffhr | leesflveed | kkherhpifg |
| 121 | nivdevayhe | kyptiyhlrk | klvdstdkad | lrliylalah | mikfrghfli | egdlnpdnsd |
| 181 | vdklfiqlvq | tynqlfeenp | inasgvdaka | ilsarlsksr | rlenliaqlp | gekknglign |
| 241 | lialslgltp | nfksnfdlae | daklqlskdt | ydddldnlla | qigdqyadlf | laaknlsdai |
| 301 | llSdilrvnT | eiTkaplsas | mikrydehhq | dltllkalvr | qqlpekykei | ffdqSkngya |
| 361 | gyidggasqe | efykfikpil | ekmdgteell | vklnredllr | kqrtfdngsi | phqihlgelh |
| 421 | ailrrqedfy | pflkdnreki | ekiltfripy | yvgplArgnS | rfAwmTrkSe | eTiTpwnfee |
| 481 | vvdKgasaqs | fiermtnfdk | nlpnekvlpk | hsilyeyftv | yneltkvkyv | tegmrkpafl |
| 541 | sgeqkkaivd | llfktnrkvt | vkqlkedyfk | kieCfdSvei | sgvedrfnAS | lgtyhdllki |
| 601 | ikdkdfldne | enedilediv | ltltlfedre | mieerlktya | hlfddkvmkq | lkrrrytgwg |
| 661 | rlsrklingi | rdkgsgktil | dflksdgfan | rnfmqlihdd | sltfkediqk | aqvsgqgds |
| 721 | hehianlags | paikkgilqt | vkvvdelvkv | mgrhkpeniv | iemarenqtt | qkgqknsrer |
| 781 | mkrieegike | lgsqilkehp | ventqlqnek | lylyylqngr | dmyvdqeldi | nrlsdydvdh |
| 841 | ivpgsflkdd | sidnkvltrs | dknrgksdnv | pseevvkkmk | nywrqllnak | litqrkfdnl |
| 901 | tkaergglse | ldkagfikrq | lvetrqitkh | vaqildsrmn | tkydendkli | revkvitlks |
| 961 | klvsdrkdf | qfykvreinn | yhhahdayln | avvgtalikk | ypklesefvy | gdykvydvrk |
| 1021 | miakseqeig | katakyffys | nimnffktei | tlangeirkr | plietngetg | eivwdkgrdf |
| 1081 | atvrkvlsmp | qvnivkktev | qtggfskesi | lpkrnsdkli | arkkdwdpkk | yggfdsptva |
| 1141 | ysvlvvakve | kgkskklksv | kellgitime | rssfeknpid | fleakgykev | kkdliiklpk |
| 1201 | yslfelengr | krmlasagel | qkgnelalps | kyvnflylas | hyeklkgspe | dneqkqlfve |
| 1261 | qhkhyldeii | eqisefskrv | iladanldkv | lsaynkhrdk | pireqaenii | hlftltnga |
| 1321 | paafkyfdtt | idrkrytstk | evldatlihq | sitglyetri | dlsqlggd. | |

### Pharmaceutical Compositions

[0703] In some aspects, the present invention provides a pharmaceutical composition comprising any of the genetically modified cells, base editors, fusion proteins, or the fusion protein-guide polynucleotide complexes described herein The pharmaceutical compositions of the present invention can be prepared in accordance with known techniques. See, e.g., Remington, The Science And Practice of Pharmacy (21st ed. 2005). In general, the cell, or population thereof is admixed with a suitable carrier prior to administration or storage, and in some embodiments, the pharmaceutical composition further comprises a pharmaceutically acceptable carrier. Suitable pharmaceutically acceptable carriers generally comprise inert substances that aid in administering the pharmaceutical composition to a subject, aid in processing the pharmaceutical compositions into deliverable preparations, or aid in storing the pharmaceutical composition prior to administration. Pharmaceutically acceptable carriers can include agents that can stabilize, optimize or otherwise alter the form, consistency, viscosity, pH, pharmacokinetics, solubility of the formulation. Such agents include buffering agents, wetting agents, emulsifying agents, diluents, encapsulating agents, and skin penetration enhancers. For example, carriers can include, but are not limited to, saline, buffered saline, dextrose, arginine, sucrose, water, glycerol, ethanol, sorbitol, dextran, sodium carboxymethyl cellulose, and combinations thereof.

[0704] Some nonlimiting examples of materials which can serve as pharmaceutically-acceptable carriers include: (1) sugars, such as lactose, glucose and sucrose; (2) starches, such as corn starch and potato starch; (3) cellulose, and its derivatives, such as sodium carboxymethyl cellulose, methylcellulose, ethyl cellulose, microcrystalline cellulose and cellulose acetate; (4) powdered tragacanth; (5) malt; (6) gelatin; (7) lubricating agents, such as magnesium stearate, sodium lauryl sulfate and talc; (8) excipients, such as cocoa butter and suppository waxes; (9) oils, such as peanut oil, cottonseed oil, safflower oil, sesame oil, olive oil, corn oil and soybean oil; (10) glycols, such as propylene glycol; (11) polyols, such as glycerin, sorbitol, mannitol and polyethylene glycol (PEG); (12) esters, such as ethyl oleate and ethyl laurate; (13) agar; (14) buffering agents, such as magnesium hydroxide and aluminum hydroxide; (15) alginic acid; (16) pyrogen-free water; (17) isotonic saline; (18) Ringer's solution; (19) ethyl alcohol; (20) pH buffered solutions; (21) polyesters, polycarbonates and/or polyanhydrides; (22) bulking agents, such as polypeptides and amino acids (23) serum alcohols, such as ethanol; and (23) other non-toxic compatible substances employed in pharmaceutical formulations. Wetting agents, coloring agents, release agents, coating agents, sweetening agents, flavoring agents, perfuming agents, preservative and antioxidants can also be present in the formulation.

[0705] Pharmaceutical compositions can comprise one or more pH buffering compounds to maintain the pH of the formulation at a predetermined level that reflects physiological pH, such as in the range of about 5.0 to about 8.0. The pH buffering compound used in the aqueous liquid formulation can be an amino acid or mixture of amino acids, such as histidine or a mixture of amino acids such as histidine and glycine. Alternatively, the pH buffering compound is preferably an agent which maintains the pH of the formulation at a predetermined level, such as in the range of about 5.0 to about 8.0, and which does not chelate calcium ions. Illustrative examples of such pH buffering compounds include, but are not limited to, imidazole and acetate ions. The pH buffering compound may be present in any amount suitable to maintain the pH of the formulation at a predetermined level.

[0706] Pharmaceutical compositions can also contain one or more osmotic modulating agents, i.e., a compound that modulates the osmotic properties (e.g., tonicity, osmolality, and/or osmotic pressure) of the formulation to a level that is acceptable to the blood stream and blood cells of recipient individuals. The osmotic modulating agent can be an agent that does not chelate calcium ions. The osmotic modulating agent can be any compound known or available to those skilled in the art that modulates the osmotic properties of the formulation. One skilled in the art may empirically determine the suitability of a given osmotic modulating agent for use in the inventive formulation. Illustrative examples of suitable types of osmotic modulating agents include, but are not limited to: salts, such as sodium chloride and sodium acetate; sugars, such as sucrose, dextrose, and mannitol; amino acids, such as glycine; and mixtures of one or more of these agents and/or types of agents. The osmotic modulating agent(s) may be present in any concentration sufficient to modulate the osmotic properties of the formulation.

[0707] In addition to a modified cell, or population thereof, and a carrier, the pharmaceutical compositions of the present invention can include at least one additional therapeutic agent useful in the treatment of disease. For example, some embodiments of the pharmaceutical composition described herein further comprises a chemotherapeutic agent. In some embodiments, the pharmaceutical composition further comprises a cytokine peptide or a nucleic acid sequence encoding a cytokine peptide. In some embodiments, the pharmaceutical compositions comprising the cell or population thereof can be administered separately from an additional therapeutic agent.

[0708] One consideration concerning the therapeutic use of genetically modified cells of the invention is the quantity of cells necessary to achieve an optimal or satisfactory effect. The quantity of cells to be administered may vary for the subject being treated. In one embodiment, between 10⁴ to 10¹⁰, between 10⁵ to 10⁹, or between 10⁶ and 10⁸ genetically modified cells of the invention are administered to a human subject. In some embodiments, at least about 1×10e8, 2×10e8, 3×10⁸, 4×10e8, and 5×10e8 genetically modified cells of the invention are administered to a human subject. Determining the precise effective dose may be based on factors for each individual subject, including their size, age, sex, weight, and condition. Dosages can be readily ascertained by those skilled in the art from this disclosure and the knowledge in the art.

[0709] The skilled artisan can readily determine the number of cells and amount of optional additives, vehicles, and/or carriers in compositions and to be administered in methods of the invention. Typically, additives (in addition to the cell(s)) are present in an amount of 0.001 to 50% (weight) solution in phosphate buffered saline, and the active ingredient is present in the order of micrograms to milligrams, such as about 0.0001 to about 5 wt %, preferably about 0.0001 to about 1 wt %, still more preferably about 0.0001 to about 0.05 wt % or about 0.001 to about 20 wt %, preferably about 0.01 to about 10 wt %, and still more preferably about 0.05 to about 5 wt %. Of course, for any composition to be administered to an animal or human, and for any particular method of administration, it is preferred to determine therefore: toxicity, such as by determining the lethal dose (LD) and LD₅₀ in a suitable animal model (e.g., a rodent such as a mouse); and, the dosage of the composition(s), concentration of components therein, and the timing of administering the composition(s), which elicit a suitable response. Such determinations do not require undue experimentation from the knowledge of the skilled artisan, this disclosure and the documents cited herein. And, the time for sequential administrations can be ascertained without undue experimentation.

[0710] In some embodiments, the pharmaceutical composition is formulated for delivery to a subject. Suitable routes of administrating the pharmaceutical composition described herein include, without limitation: topical, subcutaneous, transdermal, intradermal, intralesional, intraarticular, intraperitoneal, intravesical, transmucosal, gingival, intradental, intracochlear, transtympanic, intraorgan, epidural, intrathecal, intramuscular, intravenous, intravascular, intraosseus, periocular, intratumoral, intracerebral, and intracerebroventricular administration.

[0711] In some embodiments, the pharmaceutical composition described herein is administered locally to a diseased site. In some embodiments, the pharmaceutical composition described herein is administered to a subject by injection, by means of a catheter, by means of a suppository, or by means of an implant, the implant being of a porous, non-porous, or gelatinous material, including a membrane, such as a sialastic membrane, or a fiber.

[0712] In other embodiments, the pharmaceutical composition described herein is delivered in a controlled release system. In one embodiment, a pump can be used (see, e.g., Langer, 1990, Science 249: 1527-1533; Sefton, 1989, CRC Crit. Ref. Biomed. Eng. 14:201; Buchwald et al., 1980, Surgery 88:507; Saudek et al., 1989, N. Engl. J. Med. 321:574). In another embodiment, polymeric materials can be used. (See, e.g., Medical Applications of Controlled Release (Langer and Wise eds., CRC Press, Boca Raton, Fla., 1974); Controlled Drug Bioavailability, Drug Product Design and Performance (Smolen and Ball eds., Wiley, New York, 1984); Ranger and Peppas, 1983, Macromol. Sci. Rev. Macromol. Chem. 23:61. See also Levy et al., 1985, Science 228: 190; During et al., 1989, Ann. Neurol. 25:351; Howard et al., 1989, J. Neurosurg. 71: 105.) Other controlled release systems are discussed, for example, in Langer, supra.

[0713] In some embodiments, the pharmaceutical composition is formulated in accordance with routine procedures as a composition adapted for intravenous or subcutaneous administration to a subject, e.g., a human. In some embodiments, pharmaceutical composition for administration by injection are solutions in sterile isotonic use as solubilizing agent and a local anesthetic such as lignocaine to ease pain at the site of the injection. Generally, the ingredients are supplied either separately or mixed together in unit dosage form, for example, as a dry lyophilized powder or water free concentrate in a hermetically sealed container such as an ampoule or sachette indicating the quantity of active agent. Where the pharmaceutical is to be administered by infusion, it can be dispensed with an infusion bottle containing sterile pharmaceutical grade water or saline. Where the pharmaceutical composition is administered by injection, an ampoule of sterile water for injection or saline can be provided so that the ingredients can be mixed prior to administration.

[0714] A pharmaceutical composition for systemic administration can be a liquid, e.g., sterile saline, lactated Ringer's or Hank's solution. In addition, the pharmaceutical composition can be in solid forms and re-dissolved or suspended immediately prior to use. Lyophilized forms are also contemplated. The pharmaceutical composition can be contained within a lipid particle or vesicle, such as a liposome or microcrystal, which is also suitable for parenteral administration. The particles can be of any suitable structure, such as unilamellar or plurilamellar, so long as compositions are contained therein. Compounds can be entrapped in “stabilized plasmid-lipid particles” (SPLP) containing the fusogenic lipid dioleoylphosphatidylethanolamine (DOPE), low levels (5-10 mol %) of cationic lipid, and stabilized by a polyethyleneglycol (PEG) coating (Zhang Y. P. et al., Gene Ther. 1999, 6: 1438-47). Positively charged lipids such as N-[l-(2,3-dioleoyloxi)propyl]-N,N,N-trimethyl-amoniummethylsulfate, or “DOTAP,” are particularly preferred for such particles and vesicles. The preparation of such lipid particles is well known. See, e.g., U.S. Pat. Nos. 4,880,635; 4,906,477; 4,911,928; 4,917,951; 4,920,016; and 4,921,757; each of which is incorporated herein by reference.

[0715] The pharmaceutical composition described herein can be administered or packaged as a unit dose, for example. The term “unit dose” when used in reference to a pharmaceutical composition of the present disclosure refers to physically discrete units suitable as unitary dosage for the subject, each unit containing a predetermined quantity of active material calculated to produce the desired therapeutic effect in association with the required diluent; i.e., carrier, or vehicle.

[0716] Further, the pharmaceutical composition can be provided as a pharmaceutical kit comprising (a) a container containing a compound of the invention in lyophilized form and (b) a second container containing a pharmaceutically acceptable diluent (e.g., sterile used for reconstitution or dilution of the lyophilized compound of the invention. Optionally associated with such container(s) can be a notice in the form prescribed by a governmental agency regulating the manufacture, use or sale of pharmaceuticals or biological products, which notice reflects approval by the agency of manufacture, use or sale for human administration.

[0717] In another aspect, an article of manufacture containing materials useful for the treatment of the diseases described above is included. In some embodiments, the article of manufacture comprises a container and a label. Suitable containers include, for example, bottles, vials, syringes, and test tubes. The containers can be formed from a variety of materials such as glass or plastic. In some embodiments, the container holds a composition that is effective for treating a disease described herein and can have a sterile access port. For example, the container can be an intravenous solution bag or a vial having a stopper pierceable by a hypodermic injection needle. The active agent in the composition is a compound of the invention. In some embodiments, the label on or associated with the container indicates that the composition is used for treating the disease of choice. The article of manufacture can further comprise a second container comprising a pharmaceutically-acceptable buffer, such as phosphate-buffered saline, Ringer's solution, or dextrose solution. It can further include other materials desirable from a commercial and user standpoint, including other buffers, diluents, filters, needles, syringes, and package inserts with instructions for use.

[0718] In some embodiments, any of the fusion proteins, gRNAs, and/or complexes described herein are provided as part of a pharmaceutical composition. In some embodiments, the pharmaceutical composition comprises any of the fusion proteins provided herein. In some embodiments, the pharmaceutical composition comprises any of the complexes provided herein. In some embodiments, the pharmaceutical composition comprises a ribonucleoprotein complex comprising an RNA-guided nuclease (e.g., Cas9) that forms a complex with a gRNA and a cationic lipid. In some embodiments pharmaceutical composition comprises a gRNA, a nucleic acid programmable DNA binding protein, a cationic lipid, and a pharmaceutically acceptable excipient. Pharmaceutical compositions can optionally comprise one or more additional therapeutically active substances.

[0719] In some embodiments, compositions provided herein are administered to a subject, for example, to a human subject, in order to effect a targeted genomic modification within the subject. In some embodiments, cells are obtained from the subject and contacted with any of the pharmaceutical compositions provided herein. In some embodiments, cells removed from a subject and contacted ex vivo with a pharmaceutical composition are re-introduced into the subject, optionally after the desired genomic modification has been effected or detected in the cells. Methods of delivering pharmaceutical compositions comprising nucleases are known, and are described, for example, in U.S. Pat. Nos. 6,453,242; 6,503,717; 6,534,261; 6,599,692; 6,607,882; 6,689,558; 6,824,978; 6,933,113; 6,979,539; 7,013,219; and 7,163,824, the disclosures of all of which are incorporated by reference herein in their entireties. Although the descriptions of pharmaceutical compositions provided herein are principally directed to pharmaceutical compositions which are suitable for administration to humans, it will be understood by the skilled artisan that such compositions are generally suitable for administration to animals or organisms of all sorts, for example, for veterinary use.

[0720] Modification of pharmaceutical compositions suitable for administration to humans in order to render the compositions suitable for administration to various animals is well understood, and the ordinarily skilled veterinary pharmacologist can design and/or perform such modification with merely ordinary, if any, experimentation. Subjects to which administration of the pharmaceutical compositions is contemplated include, but are not limited to, humans and/or other primates; mammals, domesticated animals, pets, and commercially relevant mammals such as cattle, pigs, horses, sheep, cats, dogs, mice, and/or rats; and/or birds, including commercially relevant birds such as chickens, ducks, geese, and/or turkeys.

[0721] Formulations of the pharmaceutical compositions described herein can be prepared by any method known or hereafter developed in the art of pharmacology. In general, such preparatory methods include the step of bringing the active ingredient(s) into association with an excipient and/or one or more other accessory ingredients, and then, if necessary and/or desirable, shaping and/or packaging the product into a desired single- or multi-dose unit. Pharmaceutical formulations can additionally comprise a pharmaceutically acceptable excipient, which, as used herein, includes any and all solvents, dispersion media, diluents, or other liquid vehicles, dispersion or suspension aids, surface active agents, isotonic agents, thickening or emulsifying agents, preservatives, solid binders, lubricants and the like, as suited to the particular dosage form desired. Remington's The Science and Practice of Pharmacy, 21st Edition, A. R. Gennaro (Lippincott, Williams & Wilkins, Baltimore, Md., 2006; incorporated in its entirety herein by reference) discloses various excipients used in formulating pharmaceutical compositions and known techniques for the preparation thereof. See also PCT application PCT/US2010/055131 (Publication number WO2011/053982 A8, filed Nov. 2, 2010), incorporated in its entirety herein by reference, for additional suitable methods, reagents, excipients and solvents for producing pharmaceutical compositions comprising a nuclease.

[0722] Except insofar as any conventional excipient medium is incompatible with a substance or its derivatives, such as by producing any undesirable biological effect or otherwise interacting in a deleterious manner with any other component(s) of the pharmaceutical composition, its use is contemplated to be within the scope of this disclosure.

[0723] The compositions, as described above, can be administered in effective amounts. The effective amount will depend upon the mode of administration, the particular condition being treated, and the desired outcome. It may also depend upon the stage of the condition, the age and physical condition of the subject, the nature of concurrent therapy, if any, and like factors well-known to the medical practitioner. For therapeutic applications, it is that amount sufficient to achieve a medically desirable result. In some embodiments, compositions in accordance with the present disclosure can be used for treatment of any of a variety of diseases, disorders, and/or conditions.

### Methods of Treatment

[0724] Some aspects of the present invention provide methods of treating a subject in need, the method comprising administering to a subject in need an effective therapeutic amount of a pharmaceutical composition as described herein. More specifically, the methods of treatment include administering to a subject in need thereof one or more pharmaceutical compositions comprising one or more cells having at least one edited gene. In other embodiments, the methods of the invention comprise expressing or introducing into a cell a base editor polypeptide and one or more guide RNAs capable of targeting a nucleic acid molecule encoding at least one polypeptide.

[0725] Provided herein are methods and compositions involving or containing modified cells, e.g. base edited progenitor or stem cells for engraftment purposes. Base editor systems provided herein may be used to generate modifications in target polynucleotides, e.g., a target gene or a regulatory element thereof, in a progenitor cell or a stem cell. In some embodiments, base editing is performed in a population of progenitor cells or stem cells. In some embodiments, a target gene or a regulatory element thereof may comprise a mutation or a SNP that is associated with a genetic condition, disorder, or disease. In some embodiments, a base editor system provided herein is capable of effecting a single nucleobase modification that corrects the mutation associated with the genetic condition, disorder, or disease. In some embodiments, a base editor system provided herein is capable of effecting a single nucleobase modification that does not revert the mutation or SNP associated with the genetic condition, disorder, or disease to a wild type nucleobase, but replaces the mutation or SNP with another nucleobase that ameliorates at least one symptom of the genetic condition, disorder, or disease. In some embodiments, a base editor system provided herein is capable of effecting a single nucleobase modification that does not revert the mutation or SNP associated with the genetic condition, disorder, or disease to a wild type, but introduces a nucleobase modification elsewhere in the genome that ameliorates at least one symptom of the genetic condition, disorder, or disease. In one aspect, provided herein are base editor systems and methods of using the same to generate modified cells that allow for long-term engraftment in subjects in need thereof. Genetic manipulation of target cells, e.g. stem cells, may be performed when the stem cells are resting cells (non-cycling), i.e., cells that are not dividing, or when the stem cells are cycling, i.e., cells that are dividing. Additionally, modified stem cells may be introduced into a subject for engrafting into a desired tissue or tissues. When cells of hematopoietic progenitor lineages with a gene modification are introduced into a subject, the cells are required to home into the desired tissue, be stabilized, be able to proliferate, be able to differentiate into the cell lineages and retain the gene modification and remain functionally active for a prolonged period in order for the gene-manipulated hematopoietic progenitor cells to be useful in a gene therapy.

[0726] In some embodiments, the purpose of the methods provided herein is to restore the function of a dysfunctional gene via gene editing. In some embodiments, the function of a dysfunctional gene is restored by introducing an intended mutation. In some embodiments, the methods provided herein can be used to disrupt the normal function of a gene product. The nucleobase editing proteins provided herein can be validated for gene editing-based human therapeutics in vitro, e.g., by correcting a disease-associated mutation in human cell culture. It will be understood by the skilled artisan that the nucleobase editing proteins provided herein, e.g., the fusion proteins comprising a napDNAbp domain (e.g., Cas12) and a nucleobase editing domain (e.g., an adenosine deaminase domain or a cytidine deaminase domain) can be used to correct any single point A to G or C to T mutation. In the first case, deamination of the mutant A to I corrects the mutation, and in the latter case, deamination of the A that is base-paired with the mutant T, followed by a round of replication, corrects the mutation.

[0727] Provided herein is a method of gene editing in hematopoietic stem cells, for example, a adenosine base edited hemoglobin gene or a regulatory region thereof, such as a promoter region, wherein the gene edited hematopoietic stem cells exhibit one or more of: higher editing efficiency; higher fidelity and significantly lower off-target editing events; higher survival of edited cells; higher persistence of edited cells in vitro; higher survival and persistence of edited cells in vivo; higher engraftment potential; higher ability to differentiate into erythropoietic lineage, higher proliferation capability in vitro, higher proliferation capability in vivo, higher expression of HbF; and higher reduction in a defective globin gene expression such as HbS, when compared to previously reported or existing base editing systems. In some embodiments, the improvements in the adenosine base editing system provided herein is associated with at least one of the following advantages: higher editing efficiency; higher fidelity and significantly reduced or lower off-target editing events; higher survival of edited cells, higher persistence of edited cells in vitro; higher survival and persistence of edited cells in vivo; higher engraftment potential; higher ability to differentiate into erythropoietic lineage; higher proliferation capability in vitro, higher proliferation capability in vivo, higher expression of HbF; and higher reduction in a defective globin gene expression such as HbS when compared to previously reported or existing base editing systems.

[0728] In an aspect, provided herein are methods for engrafting a population of edited cells in a subject in need thereof. The engrafted cells may be autologous or allogeneic cells. In some embodiments, the cells for engraftment are allogeneic cells. In some embodiments, the cells for engraftment are obtained from a donor. In some embodiments, the donor is a healthy donor, or a donor that is histocompatibility matched with the subject. In some embodiments, the cells are isolated from the subject. In some embodiments, a target cell or population of cells for editing are isolated from a subject. In some embodiments, a target cell or population of cells for editing are derived from a donor other than the subject. In some embodiments, the target cell or population of cells are contacted with a base editor system provided herein to generate a desired nucleobase modification. For example, a population of hematopoietic stem cells may be isolated from a patient with sickle cell disease (SCD) and base edited for engraftment. The cell isolated from the patient may comprise a mutation or SNP associated with a genetic disease, disorder, or condition that may be corrected or ameliorated by base editing. In some embodiments, at least about 10%, 15%, 20%, 25%, 30%, 35%, 40%, 45%, 50%, 55%, 60%, 65%, 70%, 75%, 80%, 85%, 90%, 95%, 98%, or 99% of the population of cells contacted with the base editor system comprise the desired nucleobase modification. In some embodiments, the percentage of edited cells in the population is at least about 10%, 15%, 20%, 25%, 30%, 35%, 40%, 45%, 50%, 55%, 60%, 65%, 70%, 75%, 80%, 85%, 90%, 95%, 98%, 99%, 100%, 110%, 120%1c, 130%, 140%, 150%, 200%, 250%, 300% or 350% higher than in a population edited with a base editor system comprising a wild type deaminase. In some embodiments, the percentage of edited cells in the population edited with a ABE8 base editor is at least about 10%, 15%, 20%, 25%, 30%, 35%, 40%, 45%, 50%, 55%, 60%, 65%, 70%, 75%, 80%, 85%, 90%, 95%, 98%, 99%, 100%, 110%, 120%, 130%, 140%, 150%, 200%, 250%, 300% or 350% higher than in a population edited with ABE7.10. In some embodiments, the editing efficiency with a ABE8 in a population of cells is at least about 1.5, 2, 2.5, 3, 3.5, 4, 4.5, 5, 5.5, 6, 6.5, 7, 7.5, 8, 9, 10, 11, 12, 13, 14, 15, 16, 17, 18, 19, 20, 25, 30, 35, 40, 45, 50, 55, or 60 folds higher than the editing efficiency achieved with a base editor comprising a wild type deaminase. In some embodiments, the editing efficiency with a ABE8 in a population of cells is at least about 1.5, 2, 2.5, 3, 3.5, 4, 4.5, 5, 5.5, 6, 6.5, 7, 7.5, 8, 9, 10, 11, 12, 13, 14, 15, 16, 17, 18, 19, 20, 25, 30, 35, 40, 45, 50, 55, or 60 folds higher than the editing efficiency achieved with a base editor comprising an ABE7.10. In some embodiments, at least about 10%, 20%, 30%, 40%, 50%, 60%, 70%, 80%1c, 90%, 95%, or 99% of the edited population of cells retain viability. In some embodiments, the editing efficiency with a ABE8 in a population of cells is at least about 1.5, 2, 2.5, 3, 3.5, 4, 4.5, 5, 5.5, 6, 6.5, 7, 7.5, 8, 9, 10, 11, 12, 13, 14, 15, 16, 17, 18, 19, 20, 25, 30, 35, 40, 45, 50, 55, or 60 folds higher than the editing efficiency achieved with a base editor comprising an ABE7.10. In some embodiments, at least about 10%, 20%, 30%, 40%, 50%, 60%, 70%, 80%, 90%, 95%, or 99% of the edited population of cells retain ability to differentiate. In some embodiments, a hematopoietic cell or a population of hematopoietic cells are contacted with a base editor system, e.g. an ABE8 system, provided herein to effect a nucleobase modification that corrects a mutation or ameliorates at least one detrimental effect of the mutation. For example, a nucleobase modification in the promoter region of HBG1/2 may increase the expression of hemoglobin gamma subunit and/or the expression of HbF protein, thereby compensating for at least one sickle cell disease (SCD) detrimental effect. In some embodiments, expression of a hemoglobin gamma subunit is increased by at least about 1.5, 2, 2.5, 3, 3.5, 4, 4.5, 5, 5.5, 6, 6.5, 7, 7.5, 8, 9, 10, 11, 12, 13, 14, 15, 16, 17, 18, 19, 20, 25, 30, 35, 40, 45, 50, 55, or 60 folds in a hematopoietic cell as compared to a control cell without the base edit. In some embodiments, expression of a hemoglobin gamma subunit is increased by at least about 1.5, 2, 2.5, 3, 3.5, 4, 4.5, 5, 5.5, 6, 6.5, 7, 7.5, 8, 9, 10, 11, 12, 13, 14, 15, 16, 17, 18, 19, 20, 25, 30, 35, 40, 45, 50, 55, or 60 folds in a population of hematopoietic cells as compared to a population of control cells without the base edit. In some embodiments, expression of a hemoglobin gamma subunit is increased by at least about 1.5, 2, 2.5, 3, 3.5, 4, 4.5, 5, 5.5, 6, 6.5, 7, 7.5, 8, 9, 10, 11, 12, 13, 14, 15, 16, 17, 18, 19, 20, 25, 30, 35, 40, 45, 50, 55, or 60 folds in a subject engrafted with a hematopoietic cell or a population of hematopoietic cells with the base edit as compared to pre-engraftment level of hemoglobin gamma subunit. In some embodiments, sickling is reduced by at least about 10%, 15%, 20/o, 25%, 30%, 35%, 40%, 45%, 50%, 55%, 60%, 65%, 70%, 75%, 80%, 85%, 90%, or 95% in a population of base edited hematopoietic cells as compared to a control population of cells, wherein sickling is measured by the percentage of cells exhibiting sickling phenotype. In some embodiments, expression of a HbF protein is increased by at least about 1.5, 2, 2.5, 3, 3.5, 4, 4.5, 5, 5.5, 6, 6.5, 7, 7.5, 8, 9, 10, 11, 12, 13, 14, 15, 16, 17, 18, 19, 20, 25, 30, 35, 40, 45, 50, 55, or 60 folds in a subject engrafted with a hematopoietic cell or a population of hematopoietic cells with the base edit as compared to pre-engraftment level of HbF in the subject. In some embodiment, the subject is a mammal. In some embodiments, the subject is a human, a non-human primate, a cat, a dog, a pig, a cattle, a house, a camel, a llama, a goat, a sheep, a rodent, a mouse, a rat, a rabbit, a guinea pig, or any other suitable mammal.

[0729] Base edited cells for engraftment may be any type of suitable cells. In some embodiments, the base edited cell or cells for engraftment are hematopoietic stem cells, common myeloid progenitors, proerythroblasts, erythroblasts, reticulocytes, or erythrocytes.

[0730] In some embodiments, a subject receives a base edited cell or a population of base edited cells, e.g., a population of hematopoietic stem cells, for long term engraftment. In some embodiments, one or more lymphocytic lineage cells are depleted prior to engraftment. The engraftment may be directed to a particular tissue or particular tissues or organs, for example, blood or bone marrow.

[0731] In some embodiments, the subject (e.g., human subject) is prepared with a conditioning regimen before transplantation and engraftment of the base edited cells. In some embodiments, the transplant is autologous (e.g., obtained or derived from the subject). In some embodiments, the transplant is allogeneic (e.g., obtained or derived from a donor). Depending on the type of transplant, a myeloablative or non-myeloablative conditioning may be used. Myeloablative conditioning results in ablation of bone marrow and may comprise chemical agents, radiation, or combinations thereof (e.g., cyclophosphamide with total body irradiation). Chemical agents useful for conditioning include without limitation, busulfan, treosulfan, cyclophosphamide, fludaraine, and the like. Non-myeloablative conditioning uses lower doses of chemical agents and radiation. Non-myeloablative conditioning may comprise the use of antibody and antibody drug conjugates that target and eliminate hematopoietic stem cells.

[0732] An edited population of cells with high editing efficiency as provided herein may not need to be enriched for engraftment to a subject. In some embodiments, the base edited cell or population of cells retain the ability to differentiate after engraftment. In some embodiments, the base edited cell or population of cells retain the ability to differentiate at least about 1 week, 2 weeks, 3 weeks, 4 weeks, 5 weeks, 6 weeks, 7 weeks, 8 weeks, 9 weeks, 10 weeks, 11 weeks, 12 weeks, 13 weeks, 14 weeks, 15 weeks, 16 weeks, 17 weeks, 18 weeks, 19 weeks, 20 weeks, 6 months, 7 months, 8 months, 9 months, 10 months, 11 months, 12 months, 1.5 year, 2 years, 2.5 years, 3 years, 3.5 years, or 4 years after engraftment. In some embodiments, the tissue or organ that is engrafted with base edited cells retain the nucleobase modification effected by the base editor system post engraftment. In some embodiments, the tissue or organ that is engrafted with base edited cells retain the nucleobase modification effected by the base editor system after differentiation of the engrafted cell or population of cells. In some embodiments, at least about 1%, 2%, 5%, 7%, 10%, 15%, 20%, 30% or 40% or 50%, 60%, 70%, 80%, 90% or more of cells in the tissue or organ engrafted with the base edited cell or population of cells retain the nucleobase modification after engraftment. In some embodiments, at least about 1%, 2%, 5%, 7%, 10%, 15%, 20%, 30% or 40% or 50%, 60%, 70%, 80%, 90% or more of cells in the tissue or organ engrafted with the base edited cell or population of cells retain the nucleobase modification after differentiation of the engrafted cell or population of cells. In some embodiments, at least about 1%, 2%, 5%, 7%, 10%, 15%, 20%, 30% or 40% or 50%, 60%, 70%, 80%, 90% or more of cells in the tissue or organ engrafted with the base edited cell or population of cells retain the nucleobase modification at least about 1 week, 2 weeks, 3 weeks, 4 weeks, 5 weeks, 6 weeks, 7 weeks, 8 weeks, 9 weeks, 10 weeks, 11 weeks, 12 weeks, 13 weeks, 14 weeks, weeks, 16 weeks, 17 weeks, 18 weeks, 19 weeks, 20 weeks, 6 months, 7 months, 8 months, 9 months, 10 months, 11 months, 12 months, 1.5 year, 2 years, 2.5 years, 3 years, 3.5 years, or 4 years after engraftment. In some embodiments, the methods and compositions provided herein lead to at least 10%, at least 20%, at least 30% or 40% or 50%, 60%, 70%, 80%, 90% or more improvement in engraftment efficiency of the base edited hematopoietic cells compared to a previously reported or method or compositions using an existing base editing system. In some embodiments, the ABE edited hematopoietic cells generated by the methods described herein are at least 2-fold, 3-fold, 4-fold, 5-fold, 6-fold, 7-fold, 8-fold, 9-fold, 10 fold, 15-fold, 20-fold, 25-fold, 30-fold, 40-fold, 50-fold, 60-fold, 70-fold, 80-fold, 90-fold or at least 100-fold or more efficient in engrafting than ABE edited hematopoietic cells generated by an ABE7.10.

[0733] The compositions, as described above, can be administered in effective amounts. The effective amount will depend upon the mode of administration, the particular condition being treated, and the desired outcome. It may also depend upon the stage of the condition, the age and physical condition of the subject, the nature of concurrent therapy, if any, and like factors well-known to the medical practitioner. For therapeutic applications, it is that amount sufficient to achieve a medically desirable result.

[0734] In one embodiment, a subject is administered at least 0.1′105 cells, at least 0.5×105 cells, at least 1×10⁵ cells, at least 5×10⁵ cells, at least 1×10⁶ cells, at least 0.5×10⁷ cells, at least 1×10⁷ cells, at least 0.5×10⁸ cells, at least 1×10⁸ cells, at least 0.5×10⁹ cells, at least 1×10⁹ cells, at least 2×109 cells, at least 3×109 cells, at least 4×109 cells, at least 5×109 cells, or at least 1×10¹⁰ cells. In particular embodiments, about 1×107 cells to about 1×109 cells, about 2×107 cells to about 0.9×109 cells, about 3×107 cells to about 0.8×109 cells, about 4×107 cells to about 0.7×10⁹ cells, about 5×10⁷ cells to about 0.6×10⁹ cells, or about 5×10⁷ cells to about 0.5×10⁹ cells are administered to the subject.

[0735] In one embodiment, a subject is administered at least 0.1×10⁴ cells/kg of bodyweight, at least 0.5×10⁴ cells/kg of bodyweight, at least 1×10⁴ cells/kg of bodyweight, at least 5×10⁴ cells/kg of bodyweight, at least 1×10⁵ cells/kg of bodyweight, at least 0.5×10⁶ cells/kg of bodyweight, at least 1×10⁶ cells/kg of bodyweight, at least 0.5×10⁷ cells/kg of bodyweight, at least 1×10⁷ cells/kg of bodyweight, at least 0.5×10⁸ cells/kg of bodyweight, at least 1×10⁸ cells/kg of bodyweight, at least 2×10⁸ cells/kg of bodyweight, at least 3×10⁸ cells/kg of bodyweight, at least 4×10⁸ cells/kg of bodyweight, at least 5×108 cells/kg of bodyweight, or at least 1×10⁹ cells/kg of bodyweight. In particular embodiments, about 1×10⁶ cells/kg of bodyweight to about 1×10⁸ cells/kg of bodyweight, about 2×10⁶ cells/kg of bodyweight to about 0.9×10⁸ cells/kg of bodyweight, about 3×106 cells/kg of bodyweight to about 0.8×10⁸ cells/kg of bodyweight, about 4×106 cells/kg of bodyweight to about 0.7×10⁸ cells/kg of bodyweight, about 5×10⁶ cells/kg of bodyweight to about 0.6×10⁸ cells/kg of bodyweight, or about 5×10⁶ cells/kg of bodyweight to about 0.5×108 cells/kg of bodyweight are administered to the subject.

[0736] One of ordinary skill in the art would recognize that multiple administrations of the pharmaceutical compositions contemplated in particular embodiments may be required to affect the desired therapy. For example, a composition may be administered to the subject 1, 2, 3, 4, 5, 6, 7, 8, 9, or 10 or more times over a span of 1 week, 2 weeks, 3 weeks, 1 month, 2 months, 3 months, 4 months, 5 months, 6 months, 1 year, 2 years, 5, years, 10 years, or more. In any of such methods, the methods may comprise administering to the subject an effective amount of an edited cell or a base editor system or polynucleotide encoding such system. In any of such methods, the methods may comprise administering one or more doses of an effective amount of the edited cells per day. In any of such methods, the methods may comprise administering two or more doses of an effective amount of the modified cells per day. In any of such methods, the methods may comprise administering three or more doses of an effective amount of the edited cells per day. In any of such methods, the methods may comprise administering one or more doses of an effective amount of the edited cells per week. In any of such methods, the methods may comprise administering two or more doses of an effective amount of the edited cells per week. In any of such methods, the methods may comprise administering three or more doses of an effective amount of the edited cells per week. In any of such methods, the methods may comprise administering one or more doses of an effective amount of the edited cells per month. In any of such methods, the methods may comprise administering two or more doses of an effective amount of the edited cells per month. In any of such methods, the methods may comprise administering three or more doses of an effective amount of the edited cells per month.

[0737] Administration of the pharmaceutical compositions contemplated herein may be carried out using conventional techniques including, but not limited to, infusion, transfusion, or parenterally. In some embodiments, parenteral administration includes infusing or injecting intravascularly, intravenously, intramuscularly, intraarterially, intrathecally, intratumorally, intradermally, intraperitoneally, transtracheally, subcutaneously, subcuticularly, intraarticularly, subcapsularly, subarachnoidly and intrasternally.

[0738] In some embodiments, a composition described herein (e.g., edited cell, base editor system) is administered in a dosage that is about 0.5-30 mg per kilogram body weight of the human subject. In another embodiment, the amount of the composition administered is about 0.5-20 mg per kilogram body weight of the human subject. In another embodiment, the amount of the composition administered is about 0.5-10 mg per kilogram body weight of the human subject. In another embodiment, the amount of the composition administered is about 0.04 mg, about 0.08 mg, about 0.16 mg, about 0.32 mg, about 0.64 mg, about 1.25 mg, about 1.28 mg, about 1.92 mg, about 2.5 mg, about 3.56 mg, about 3.75 mg, about 5.0 mg, about 7.12 mg, about 7.5 mg, about 10 mg, about 14.24 mg, about 15 mg, about 20 mg, or about 30 mg per kilogram body weight of the human subject. In another embodiment, the amount of the compo composition und administered is about 1.92 mg, about 3.75 mg, about 7.5 mg, about 15.0 mg, or about 30.0 mg per kilogram body weight of the human subject and the composition is administered two times a week. In another embodiment, the amount of the composition administered is about 1.28 mg, about 2.56 mg, about 5.0 mg, about 10 mg, or about 20 mg per kilogram body weight of the human subject and the composition is administered two times a week. In another embodiment, the amount of the composition administered is about 1.92 mg, about 3.75 mg, about 7.5 mg, about 15.0 mg, or about 30.0 mg per kilogram body weight of the human subject and the composition is administered once a week. In another embodiment, the amount of the composition administered is about 1.28 mg, about 2.56 mg, about 5.0 mg, about 10 mg, or about 20 mg per kilogram body weight of the human subject and the composition is administered once a week. In another embodiment, the amount of the composition administered is about 1.92 mg, about 3.75 mg, about 7.5 mg, about 15.0 mg, or about 30.0 mg per kilogram body weight of the human subject and the composition is administered once a day three, five or seven times in a seven day period. In another embodiment, the composition is administered intravenously once a day, seven times in a seven day period. In another embodiment, the amount of the composition administered is about 1.28 mg, about 2.56 mg, about 5.0 mg, about 10 mg, or about 20 mg per kilogram body weight of the human subject and the composition is administered once a day three, five or seven times in a seven day period. In another embodiment, the composition is administered intravenously once a day, seven times in a seven day period.

[0739] In some embodiments, the composition is administered over a period of 0.25 h (hours), 0.5 h, 1 h, 2 h, 3 h, 4 h, 5 h, 6 h, 7 h, 8 h, 9 h, 10 h, 11 h, or 12 h. In another embodiment, the composition is administered over a period of 0.25-2 h. In another embodiment, the composition is gradually administered over a period of 1 h. In another embodiment, the composition is gradually administered over a period of 2 h.

[0740] In one embodiment, the invention provides a method of monitoring treatment progress is provided. The method includes the step of determining a level of diagnostic marker (Marker) (e.g., SNP associated with the disease or condition) or diagnostic measurement (e.g., screen, assay) in a subject suffering from or susceptible to a disease, disorder, or symptoms thereof in which the subject has been administered a therapeutic amount of a composition herein sufficient to treat the disease or symptoms thereof. The level of Marker determined in the method can be compared to known levels of Marker in either healthy normal controls or in other afflicted patients to establish the subject's disease status. In preferred embodiments, a second level of Marker in the subject is determined at a time point later than the determination of the first level, and the two levels are compared to monitor the course of disease or the efficacy of the therapy. In certain preferred embodiments, a pre-treatment level of Marker in the subject is determined prior to beginning treatment according to this invention; this pre-treatment level of Marker can then be compared to the level of Marker in the subject after the treatment commences, to determine the efficacy of the treatment.

[0741] In some embodiments, cells are obtained from the subject and contacted with a pharmaceutical composition as provided herein. In some embodiments, cells removed from a subject and contacted ex vivo with a pharmaceutical composition are re-introduced into the subject, optionally after the desired genomic modification has been effected or detected in the cells. Methods of delivering pharmaceutical compositions comprising nucleases are described, for example, in U.S. Pat. Nos. 6,453,242; 6,503,717; 6,534,261; 6,599,692; 6,607,882: 6,689,558; 6,824,978; 6,933,113; 6,979,539; 7,013,219; and 7,163,824, the disclosures of all of which are incorporated by reference herein in their entireties. Although the descriptions of pharmaceutical compositions provided herein are principally directed to pharmaceutical compositions that are suitable for administration to humans, it will be understood by the skilled artisan that such compositions are generally suitable for administration to animals or organisms of all sorts, for example, for veterinary use.

[0742] The response in individual subjects can be characterized as a complete response, a partial response, or stable disease. In some embodiments, the response is a partial response (PR). In some embodiments, the response is a complete response (CR). In some embodiments, the response results in progression-free survival of the subject (e.g., stable disease). In some embodiments, the treatment results in an increased survival time of the human subject as compared to the expected survival time of the human subject if the human subject was not treated with the compound. In some embodiments, the human subject to be treated with the described methods is a child (e.g., 0-18 years of age). In other embodiments, the human subject to be treated with the described methods is an adult (e.g., 18+ years of age).

Such fusion proteins can be used for targeted editing of DNA in vitro, e.g., for the generation of mutant cells or animals; for the introduction of targeted mutations, e.g., for the correction of genetic defects in cells ex vivo, e.g., in cells obtained from a subject that are subsequently re-introduced into the same or another subject; and for the introduction of targeted mutations in vivo, e.g., the correction of genetic defects or the introduction of deactivating mutations in disease-associated genes in a G to A, or a T to C to mutation can be treated using the nucleobase editors provided herein.

### Kits

[0743] The invention provides kits for the treatment of a hemoglobinopathy (e.g. sickle cell disease) in a subject. In some embodiments, the kit further includes a base editor system or a polynucleotide encoding a base editor system, wherein the base editor polypeptide system a nucleic acid programmable DNA binding protein (napDNAbp), a deaminase, and a guide RNA. In some embodiments, the napDNAbp is Cas9 or Cas12. In some embodiments, the polynucleotide encoding the base editor is a mRNA sequence. In some embodiments, the deaminase is a cytidine deaminase or an adenosine deaminase. In some embodiments, the kit comprises an edited cell and instructions regarding the use of such cell.

[0744] The kits may further comprise written instructions for using the base editor system and/or edited cell. In other embodiments, the instructions include at least one of the following: precautions; warnings; clinical studies; and/or references. The instructions may be printed directly on the container (when present), or as a label applied to the container, or as a separate sheet, pamphlet, card, or folder supplied in or with the container. In a further embodiment, a kit can comprise instructions in the form of a label or separate insert (package insert) for suitable operational parameters. In yet another embodiment, the kit can comprise one or more containers with appropriate positive and negative controls or control samples, to be used as standard(s) for detection, calibration, or normalization. The kit can further comprise a second container comprising a pharmaceutically-acceptable buffer, such as (sterile) phosphate-buffered saline, Ringer's solution, or dextrose solution. It can further include other materials desirable from a commercial and user standpoint, including other buffers, diluents, filters, needles, syringes, and package inserts with instructions for use.

[0745] The practice of the present invention employs, unless otherwise indicated, conventional techniques of molecular biology (including recombinant techniques), microbiology, cell biology, biochemistry and immunology, which are well within the purview of the skilled artisan. Such techniques are explained fully in the literature, such as, “Molecular Cloning: A Laboratory Manual”, second edition (Sambrook, 1989); “Oligonucleotide Synthesis” (Gait, 1984); “Animal Cell Culture” (Freshney, 1987); “Methods in Enzymology” “Handbook of Experimental Immunology” (Weir, 1996); “Gene Transfer Vectors for Mammalian Cells” (Miller and Calos, 1987); “Current Protocols in Molecular Biology” (Ausubel, 1987); “PCR: The Polymerase Chain Reaction”, (Mullis, 1994); “Current Protocols in Immunology” (Coligan, 1991). These techniques are applicable to the production of the polynucleotides and polypeptides of the invention, and, as such, may be considered in making and practicing the invention. Particularly useful techniques for particular embodiments will be discussed in the sections that follow.

[0746] The following examples are put forth so as to provide those of ordinary skill in the art with a complete disclosure and description of how to make and use the assay, screening, and therapeutic methods of the invention, and are not intended to limit the scope of what the inventors regard as their invention.

### EXAMPLES

### Example 1: NOD.Cg-Kit^{W-41J} Tyr⁺ Prkdc^{scid} Il 2rg^{tm1Wjl}/ThomJ (NBSGW) Mouse Engraftment Protocol

[0747] This example describes an engraftment protocol using human cells engrafted into a NBSGW mouse model. In particular, female NOD.Cg-Kit^{W-41J} Tyr⁺ Prkdc^{scid}Il2rg^{tm1Wjl}/ThomJ (NBSGW) mice (Stock 026622, Jackson Laboratories) at the age of 6-7 weeks were transplanted with human CD34⁺ hematopoietic stem cells or progenitor cells (HPSCs) via the tail vein at approximately 1 million (1×10⁶) viable cells per mouse. NBSGW mice support engraftment of human hematopoietic stem cells without irradiation and are suitable for xenotransplantation use. Xenograft NBSGW mice exhibit enhanced human hematopoietic chimerism in peripheral blood, bone marrow, and spleen when compared to non-irradiated engrafted NSG mice, with a level of chimerism similar to that seen in irradiated NSG (irrNSG) mice.

[0748] Human chimerism in bone marrow was evaluated by flow cytometry at weeks 8 and 16 or at 18 weeks post-transplantation. A fraction of cells obtained from bone marrow were centrifuged and stored at −20° C. for DNA extraction and deep sequencing. For flow cytometry, cells were first incubated with anti-Fc blocking antibodies (catalog no. 422302 and 101320; BioLegend) for 15 minutes, followed by incubation with anti-human CD45 (hCD45) and anti-mouse CD45 (mCD45) antibodies. The percentage human chimerism in bone marrow was defined as [hCD45+/(hCD45˜+mCD45*)]*100.

### Example 2: Base Editor Gene Editing in Human CD34+ Cells

[0749] In this example, ABEs (delivered as mRNA) were transfected into human CD34⁺ cells, followed by measurement of cell viability and editing efficiency. Transfected cells were cryopreserved for use in a mouse engraftment study, as described in Example 1. FIG. 1 represents an exemplary procedure to generate a mammalian vector containing a polynucleotide encoding an adenosine deaminase base editor (ABE), e.g., ABE8.8, for electroporation. FIG. 2 provides an overview of a workflow for electroporating CD34⁺ cells and preparing them for mouse engraftment. In this example, cells were edited to induce a A>G nucleobase change in the promoter of HBG1/2 at position −198, which led to increased expression of HbF, gamma globin gene product.

### Electroporation Cell Preparation and Procedure

### Cell Thaw

[0750] To prepare cells for electroporation, human CD34⁺ cells were isolated from peripheral blood (PB) of healthy G-CSF/Plerixafor mobilized human donors and cryopreserved. On the day of electroporation, for each donor, a vial containing 11×20e6 cells/mL was removed from liquid nitrogen and placed on dry ice. The vial was then placed on a ThawStar Cell Thawing Unit and was removed from the unit immediately following cell thawing. A suspension of the cells (1 mL) was admixed with X-Vivo 10 cell medium w/o Gentamicin or Phenol Red, 4° C., (Lonza Pharma and Research, Basel, Switzerland), and the cells were then transferred into a conical tube (15 mL), (8 mL cell medium per 1 mL cell suspension). The cell suspension was centrifuged gently in the 15 mL conical tube at 300×g for 10 minutes at ambient temperature. The medium was aspirated from the centrifuged cells, and the centrifugation process was repeated for an additional one minute. The above process was repeated for each frozen cell aliquot. The cell pellet was next resuspended in prewarmed (37°) culture medium (Lonza X-Vivo 10 medium containing 1X glutamax, and 100 ng/mL TPO, 100 ng/mL SCF and 100 ng/mL Flt-3L at an approximate cell concentration of 1×10e6 cells/mL. If multiple frozen aliquots were processed as above, the centrifuged cell pellets were pooled in the culture medium. The resuspended cells were transferred to a non-tissue culture treated T-75 flask at an approximate cell concentration of 1×10e6 cells/mL. This process was repeated for multiple vials from each donor and the cells corresponding to each donor were respectively pooled and resuspended in 37° C. culture medium.

### Electroporation Procedure

[0751] The cells (or pooled cells) resuspended in cell medium and the mRNA for electroporation were maintained on ice. Electroporation was carried out using a MaxCyte Flow Electroporation instrument (Gaithersburg, Md.). The cell cassettes for use in the MaxCyte instrument were also prechilled to −20° C. Immediately prior the electroporation, the cells were counted; each culture flask (or cell culture plate) was rinsed with the 37° C. medium described above. By way of example, the results of the cell counts from different donors were as follows:

[0752] DONOR #1, D328644-1

[0753] Count: 1.3e6 viable cells/mL (1.3×10e6 viable cells/mL)

[0754] 95.8% viability

[0755] Volume=160 mL

[0756] Total Cells=208e6 (2.08×10e8 viable cells/mL)

[0757] DONOR #2, D327579-1

[0758] Count: 1.34e6 viable cells/mL (1.34×10e6 viable cells/mL)

[0759] 95.2% viability

[0760] Volume=160 mL

[0761] Total Cells=214.4e6 (2.144×10e8 viable cells/mL)

[0762] For the MaxCyte OC 400 electroporation cartridge, which is used for a smaller volume of cells (400 μL), cells were electroporated at a cell concentration of 100×10e6 cells/mL. To prepare the cells for electroporation, the cells were centrifuged at 300×g for 10 minutes at 4° C., the supernatant was aspirated, the cells were suspended in cell medium and again centrifuged at 300×g for an additional minute at 4° C. Following this centrifugation, the remaining supernatant was removed, and the cells were resuspended in 4° C. MaxCyte EP-Buffer containing 0.1% HSA (10 mL) and counted (e.g., on an NC-200 cell counter device (ChemoMetec A/S, Allerod, Denmark)). The results of the cell counts were as follows:

[0763] DONOR #1, D328644-1

[0764] Count #L: 1.52e6 viable cells/mL (1.52×10e6 viable cells/mL)

[0765] 98.7% viability

[0766] Volume=150 mL

[0767] Count #2: 1.49e6 viable cells/mL (1.49×10e6 viable cells/mL)

[0768] 97.5% viability

[0769] Volume=150 mL

[0770] Total Cells (Ave)=225.75e6 (˜2.26×10e8 viable cells/mL)

[0771] DONOR #2, D327579-1

[0772] Count #1: 1.42e6 viable cells/mL (1.42×10e6 viable cells/mL)

[0773] 96.6% viability

[0774] Volume=150 mL

[0775] Count #2: 1.45e6 viable cells/mL (1.45×10e6 viable cells/mL)

[0776] 98.2% viability

[0777] Volume=150 mL

[0778] Total Cells (Ave)=215.25e6 (˜2.15×10e8 viable cells/mL)

[0779] For each electroporation, the cell suspension was centrifuged at 300×g for 10 minutes at 4° C. The supernatant was aspirated; the cells were resuspended and again centrifuged at 300×g for 1 minute at 4° C. The supernatant was removed, and the cells were resuspended in 4° C. MaxCyte EP-Buffer based on the below Table 20, which provides electroporation compositions (containing 4° C. MaxCyte EP-Buffer) used to transfect cells. In Table 20, the HBG1/2 guide RNA (gRNA), i.e., “g1,” nucleotide sequence is as follows. 5′-csususGACCAAUAGCCUUGACAGUUUUAGAGCUAGAAAUAGCAAGUUAAAA UAAGGCUAGUCCGUUAUCAACUUGAAAAAGUGGCACCGAGUCGGUGCUsusu su-3′ (SEQ ID NO: 129). In the g1 gRNA sequence, A, G, U, C represent RNA nucleotides; a, g, u, c represent 2′-O-Methyl nucleotides; and s represents Phosphorothioate.

[0780] Aliquots of the resuspended cells were used to prepare the electroporation compositions (groups) presented in Table 20. Fifteen minutes prior to electroporation, the base editor-encoding mRNA (e.g., ABE8.8 or ABE7.10) and the gRNA were combined together and kept on ice. The cell suspension that was kept on ice was added to the gRNA/mRNA combination. The mixture was pipetted (e.g., 3 times), and the cell suspension was transferred into the MaxCyte OC-400 cartridge, which was prechilled in beads that were stored at −20° C. Immediately thereafter, the electroporation process was started using the MaxCyte GT system. Following electroporation, the cartridge was placed in a sterile BSC and the cell suspension was removed without touching the sides of the cartridge or rinsing the cartridge with medium or buffer. A suspension of the electroporated cells was placed in the middle of a 6-well, untreated tissue culture plate, and the plate was placed in a 37° C./5% CO₂ incubator for 20 minutes. Such an incubation is advantageous for achieving a higher level of base editing in the electroporated cells without adversely impacting cell viability. Ten (10) mL of prewarmed 37° C. culture medium (X-vivo medium containing 1X glutamax, and 100 ng/mL TPO, 100 ng/mL SCF, and 100 ng/mL Flt-3L) was added to the cell suspension, and the cells were cultured for 72 hours. Thereafter, 100,000 cells were collected at 24, 48, and 72 hours post electroporation for Next Genome Sequencing (NGS) analysis. The cell suspension was counted at 24, 48, and 72 hours using the NC-200 cell counter device to determine the number of live cells and cell viability. A majority of the cells were cryopreserved at 48 hours post electroporation.

TABLE 20

| | | | | | | | | | | | | Additional |
|---|---|---|---|---|---|---|---|---|---|---|---|---|
| | Donor ID | MaxCyte | | | | mRNA | sgRNA | mRNA | sgRNA | mRNA | sgRNA | Maxcyte |
| Gp | # | Program | Editor | Guide | Cells | μg/μL | μg/μL | μg | μg | μL | μL | Buffer μL |
| 1 | D328644- | N/A | N/A | N/A | 40 | N/A | N/A | N/A | N/A | N/A | N/A | 80 |
| 2 | 1 | HSC-3 | ABE8.8 | g1 | 40 | 2.5 | 12 | 35.2 | 51.84 | 14.08 | 4.32 | 61.6 |
| | | | (R34) | | | | | | | | | |
| 3 | | | ABE8.8 | g1 | 40 | 2.5 | 12 | 12 | 17.6 | 4.8 | 1.47 | 73.73 |
| | | | (R34) | | | | | | | | | |
| 4 | | | ABE7.10 | g1 | 40 | 2 | 12 | 35.2 | 51.84 | 17.6 | 4.32 | 58.08 |
| | | | (R35) | | | | | | | | | |
| 5 | D327579- | N/A | N/A | N/A | 40 | N/A | N/A | N/A | N/A | N/A | N/A | 80 |
| 6 | 1 | HSC-3 | ABE8.8 | g1 | 40 | 2.5 | 12 | 35.2 | 51.84 | 14.08 | 4.32 | 61.6 |
| | | | (R34) | | | | | | | | | |
| 7 | | | ABE8.8 | g1 | 40 | 2.5 | 12 | 12 | 17.6 | 4.8 | 1.47 | 73.73 |
| | | | (R34) | | | | | | | | | |
| 8 | | | ABE 7.10 | g1 | 40 | 2 | 12 | 35.2 | 51.84 | 17.6 | 4.32 | 58.08 |
| | | | (R35) | | | | | | | | | |

Exemplary cell counts are presented in Table 21:

TABLE 21
Exemplary cell counts.

| Sample | Timepoint Post | Live Cells | Viability | Volume | Total Cells |
|---|---|---|---|---|---|
| Number | Dose | (e5/mL) | (%) | (mL) | (e6/mL) |
| 1 | 24 Hours | 9.54 | 84.9 | 40 | 38.16 |
| 2 | 24 Hours | 7.9 | 85.7 | 40 | 31.6 |
| 3 | 24 Hours | 7.68 | 82.8 | 40 | 30.72 |
| 4 | 24 Hours | 9.44 | 90.8 | 40 | 37.76 |
| 5 | 24 Hours | 9.48 | 93.5 | 40 | 37.92 |
| 6 | 24 Hours | 8.38 | 84.6 | 40 | 33.52 |
| 7 | 24 Hours | 8.46 | 90.2 | 40 | 33.84 |
| 8 | 24 Hours | 8.78 | 90.2 | 40 | 35.12 |
| 1 | 48 Hours | 9.91 | 95.2 | 39 | 38.6 |
| 2 | 48 Hours | 8.2 | 94.7 | 39 | 32.0 |
| 3 | 48 Hours | 8.14 | 93.6 | 39 | 31.7 |
| 4 | 48 Hours | 9.45 | 92.8 | 39 | 36.9 |
| 5 | 48 Hours | 9.47 | 95.4 | 39 | 36.9 |
| 6 | 48 Hours | 9.12 | 95.5 | 39 | 35.6 |
| 7 | 48 Hours | 8.97 | 91.8 | 39 | 35.0 |
| 8 | 48 Hours | 9.23 | 96.3 | 39 | 36.0 |
| 1 | Pre-Dose (30 min | 32.5 | 98.5 | 10 | 32.5 |
| | Post Cryo) | | | | |
| 2 | Pre-Dose (30 min | 31.6 | 96.1 | 10 | 31.6 |
| | Post Cryo) | | | | |
| 3 | Pre-Dose (30 min | 31.8 | 97.2 | 10 | 31.8 |
| | Post Cryo) | | | | |
| 4 | Pre-Dose (30 min | 32.4 | 95.8 | 10 | 32.4 |
| | Post Cryo) | | | | |
| 5 | Pre-Dose (30 min | 30.9 | 95.4 | 10 | 30.9 |
| | Post Cryo) | | | | |
| 6 | Pre-Dose (30 min | 29.8 | 93.2 | 10 | 29.8 |
| | Post Cryo) | | | | |
| 7 | Pre-Dose (30 min | 27.6 | 92.7 | 10 | 27.6 |
| | Post Cryo) | | | | |
| 8 | Pre-Dose (30 min | 32.2 | 92.6 | 10 | 32.2 |
| | Post Cryo) | | | | |

[0781] FIG. 3A presents editing efficiency measured in donor cells edited using ABE7.10 and ABE 8.8 base editor systems, at the indicated RNA concentrations in the electroporation reactions. As demonstrated in FIG. 3A, ABE 8.8 at 20 nM and 50 nM showed high efficiency of editing in both donors. At 48 hours post electroporation, all cells showed viabilities of greater than 90% (FIG. 3B).

### Example 3. Engraftment Efficiency of Human ABE Edited Cells in Mice

[0782] This example provides representative results of engrafting ABE edited human CD3 cells from two donors into Female NOD.Cg-Kit^{W-41J} Tyr⁺ Prkdc^{scid} Il2^{tm1Wjl}/ThomJ mice (NBSGW) mice via tail vein injection. The same engraftment protocol was used as that described in Example 1. The percentage of human chimerism (i.e., percentage of donor human BM cells engrafted in bone marrow (“engraftment”) was measured at 8 weeks and 16 weeks post-injection for the donor 1 cells (FIG. 4A) and the donor 2 cells (FIG. 4B). High percentages of engraftment of the human cells (edited and unedited) were observed and edited cells displayed similar levels of chimerism compared to the unedited controls. This indicated that the edited donor cells were highly viable in vivo over prolonged periods. FIG. 5Ai and FIG. 5Aii demonstrate proliferation of ABE edited cells in vivo during a time course study by demonstrating an increase over time of the prevalence of A→G edited cells in the bone marrow. At the time of injection (In), both the doses of ABE 8.8 resulted in a higher percentage of edited cells in mouse bone marrow (BM) than ABE 7.10. When examined at 8 and 16 weeks post-injection, all of the cells proliferated with high efficiency. Cells electroporated with ABE 8.8 using 50 nM RNA had slightly higher engraftment efficiencies than cells electroporated with ABE 8.8 using 20 nM RNA, and both of the ABE 8.8 transfected cell populations showed higher engraftment efficiencies at all time points evaluated relative to ABE 7.10 transduced cells.

[0783] At 16 and 18 weeks, ABE 8.8 (50 and 20 nM doses) edited cells showed higher editing efficiencies relative to ABE 7.10 edited cells (FIG. 5B and FIG. 5C). Cells were sorted via flow cytometry for expression of LIN-hCD34⁺ and GlyA⁺.

[0784] GlyA⁺ cells were sorted and globin levels were measured by Ultra-High Performance Liquid Chromatography (UHPLC) after 16- or 18-weeks post-transplantation. FIGS. 5D and 5E show expression levels of gamma globin at 16 and 18 weeks, respectively. In FIGS. 5D and 5E, the expression levels are indicated as percent total beta-like proteins. High expression levels of gamma globin was noted at 16 or 18 weeks post-dose in both donors. Cells transcribed with ABE 8.8 RNA used in an amount of 50 nM showed higher levels of expression than cells transcribed with ABE 7.10 RNA used in an amount of 50 nM, indicating that the ABE 8.8 editing system was a significant improvement over the ABE 7.10 editing system.

[0785] To further assess long term engraftment potential and HbF generation capacity of cells containing an HBG1/2 gene promoter edited using the ABE8.8 editing system, hCD34⁺ cells from a healthy individual were edited using the ABE8.8 editing system. The cells were then introduced into NOD.Cg-Kit^{W-41J} Tyr⁺ Prkdc^{scid} Il2^{tm1Wjl}/ThomJ (NBSGW) mouse bone marrow for engraftment and measured after 16 weeks. As shown in FIG. 6A, engraftment of unedited and base-edited hCD34⁺ cells was assessed. The similar engraftment efficiencies of the edited and unedited cells indicated that there was minimal to no toxicity as a result of editing of the HBG1/2 gene promoter. This observation was consistent with the observations described for the experiments discussed above. The ABE8.8 editing system showed high base editing efficiency (FIG. 6B). Over 80% of CD34⁺ cells had A>G edits. Cells containing an edited HBG1/2 promoter region showed high expression levels of gamma globin protein (FIG. 6C), expressed as a percentage of gamma globin protein relative to total of gamma and beta hemoglobin proteins.

### Example 4. Differentiation and Persistence Efficiency of Human ABE Edited Cells Obtained from a Sickle Cell Disease (SCD) Patient Tested In Vitro

[0786] In this example, CD34⁺ cells obtained from a sickle cell disease patient were transfected with ABE8.8 mRNA and sgRNA by electroporation. Time course studies of the cells grown in vitro demonstrated viability and proliferation of the cells, as well as high base editing efficiencies (FIGS. 7A, and 7B). Of note, 16.5% of editing was observed at 48 hr post differentiation, and at 14 days post differentiation, an impressive level of 89.2% edited cells was observed (shown in FIG. 7A). The breakdown of bystander editing was measured, as shown in FIG. 7B, and revealed a high degree of editing specificity.

[0787] Edited sickle cell disease (SCD) CD34 cells were differentiated to erythroid cells, and the levels of globin in the cells were analyzed on day 18 post differentiation by UHPLC (FIGS. 8A and 8B). A 63.2% γ globin level was detected and the S globin level was reduced from 86% to 32.9% (FIGS. 8C and 8D).

### Example 5. Transplantation Study Using Different Doses of ABE 8.8-Encoding mRNA

[0788] A dose titration study was performed using mRNA encoding ABE 8.8 and HBG1/2 gRNA, which were introduced into human hematopoietic cells, e.g., CD34+ cells, (“donor cells”), by electroporation (EP). In particular, base editing of the HBG1/2 gene promoter in the cells was evaluated following electroporation of Granulocyte Colony Stimulating Factor (GCSF)+ Plerixafor-mobilized (“seed mobilized”) peripheral blood (PB) CD34+ human stem progenitor cells (HPSCs) with different concentrations (doses) of ABE8.8 mRNA and HBG1/2 gRNA. Increasing concentrations of ABE8.8 mRNA (1 nM to 30 nM) were used with a fixed concentration (3000 nM) of target guide RNA (HBG1/2a gRNA). In the study, two ABE8.8 materials, research scale (large scale) ABE8.8-encoding mRNA (Lot R34) and ABE8.8-encoding mRNA prepared by a contract research organization (CRO), (MRNA288; TriLink) were compared. FIG. 9A provides the experimental design of the study. Briefly, the seed mobilized CD34⁺ HPSCs (10⁸ cells/mL) were electroporated (EP) to introduce the ABE8.8 and the HBG1/2 gRNA into the cells, and cell viability and NGS analyses were performed at 48 hours post EP. Base editing of the HBG1/2 gene promoter using ABE8.8 and HBG1/2a gRNA was assessed in the cells. The treatment conditions of the cells involved either the use of 1, 3, 10, or 30 nM of mRNA (MRNA288)+3000 nM gRNA (pilot grade) or the use of 10 nM mRNA (MRNA288 versus Lot R34)+3000 nM gRNA (pilot versus R&D grade). Pilot grade gRNA refers to material that may be considered to closely approximate “Good Manufacturing Practice” (GMP) grade material. The gRNA (HBG1/2), or “g1,” is as described in Example 2 supra. “MRNA407” is an alternative name for “Lot R34” material.

[0789] The study also involved the introduction, e.g., via intravenous tail vein injection, (also referred to as “transplantation”) of the donor, base edited human CD34+ HPSCs into two different mouse models, i.e., a non-irradiated NBSGW mouse model and an irradiated NSG (irrNSG) mouse model. The NBSGW mouse model provides an in vivo animal system that allows for a high percentage of cell engraftment following transplant and does not result in anemic animals. The NBSGW and irrNSG mouse models were used to evaluate the engraftment capability of the HBG1/2 gene promoter-base edited human stem cells (HSCs) as described compared to that of unedited (control) cells.

[0790] The non-irradiated NBSGW mouse model was used to further evaluate the base editing levels achieved in CD34⁺ HPSCs (and progenitors of these cells) following a dose titration of ABE8.8 mRNA and to determine whether the mRNA (MRNA288) material performed similarly to the mRNA material (Lot R34) over time post-engraftment. The irradiated NSG (irrNSG) mouse model was used to evaluate base the fitness of base-edited HSCs. In addition, the two mouse models were used to evaluate whether human HSCs had the ability to differentiate into various hematopoietic lineages and retain long-term base editing in vivo. In particular, the NBSGW mouse model was used to evaluate gamma globin (γ globin) protein induction in NBSGW bone marrow-derived human erythroid cells via UHPLC analysis. The irrNSG mouse model was used to evaluate multi-lineage hematopoietic reconstitution in vivo. As illustrated in FIG. 9A, bone marrow (BM) analysis was conducted at 8 weeks following IV injection of cells, and BM and erythroid phenotyping and gamma globin (γ globin) analyses were performed at 16 weeks (long term engraftment).

[0791] The experimental regimens and materials used in the studies are summarized in Table 22 below.

TABLE 22

| | | | | | | | Number of | Scheduled |
|---|---|---|---|---|---|---|---|---|
| | | | | Mouse | Animal | Dosing | Ceils Per | Takedown |
| Group | Treatment | Materials | Dose | Strain | Number | Route | Transplant | (Week) |
| 1 | Unedited | — | — | NBSGW | 8 | IV | 1×10e6 | 8 weeks |
| | | | | irrNSG | 8 | | | (n = 3 mice) |
| 2 | Edited | MRNA | 1 nM | NBSGW | 8 | | | 16 Weeks |
| | | 288; | ABE8.8 | irrNSG | 8 | | | (n = 5 mice) |
| | | Pilot | mRNA + | | | | | |
| | | HBG1/2a | 3000 | | | | | |
| | | gRNA | nM | | | | | |
| | | | gRNA | | | | | |
| 3 | Edited | MRNA | 3 nM | NBSGW | 8 | | | |
| | | 288; | ABE8.8 | irrNSG | 8 | | | |
| | | Pilot | mRNA + | | | | | |
| | | HBG1/2a | 3000 | | | | | |
| | | gRNA | nM | | | | | |
| | | | gRNA | | | | | |
| 4 | Edited | MRNA | 10 nM | NBSGW | 8 | | | |
| | | 288; | ABE8.8 | irrNSG | 8 | | | |
| | | Pilot | mRNA + | | | | | |
| | | HBG1/2a | 3000 | | | | | |
| | | gRNA | nM | | | | | |
| | | | gRNA | | | | | |
| 5 | Edited | MRNA | 30 nM | NBSGW | 8 | | | |
| | | 288; | ABE8.8 | irrNSG | 8 | | | |
| | | Pilot | mRNA + | | | | | |
| | | HBG1/2a | 3000 | | | | | |
| | | gRNA | nM | | | | | |
| | | | gRNA | | | | | |
| 6 | Edited | Lot R34 | 10 nM | NBSGW | 8 | | | |
| | | (MRNA | ABE8.8 | irrNSG | 8 | | | |
| | | 407); | mRNA + | | | | | |
| | | Pilot | 3000 | | | | | |
| | | HBG1/2a | nM | | | | | |
| | | gRNA | gRNA | | | | | |
| 7 | Edited | Lot R34; | 10 nM | NBSGW | 8 | | | |
| | | R&D | ABE8.8 | irrNSG | 8 | | | |
| | | grade | mRNA + | | | | | |
| | | HBG1/2a | 3000 | | | | | |
| | | gRNA | nM | | | | | |
| | | | gRNA | | | | | |

[0792] In brief, for the study and as reflected in Table 22, G+P mobilized CD34+ cells (HemaCare) were thawed and cultured in 2+2 day culture in X-Vivo10 culture medium plus cytokines (Lonza Pharma and Biotech, Basel, Switzerland). Cells were base edited (Treatment—Edited) using a MaxCyte ATx Flow Electroporation instrument (HSC-3 Program; OC-400 processing component). For the NBSGW mouse model, a total of 56 NBSGW mice were studied. At 8 weeks (8 week takedown) and 16 weeks (16 week takedown), the bone marrow (BM) of 21 mice and 35 mice, respectively, was analyzed by flow cytometry and NGS analysis (n=3-4 per group for cell sorting). For the irrNSG mouse model, a total of 56 irrNSG mice were studied. At 8 weeks (8 week takedown) and 16 weeks (16 week takedown), the bone marrow (BM) cells of 21 mice and 35 mice, respectively, were analyzed by flow cytometry and NGS analysis (n=3-4 per group for cell sorting).

[0793] FIGS. 9B and 9C show long term (16 weeks) engraftment and HBG1/2 gene promoter base editing retention in NBSGW mice. The results demonstrate that similar human cell chimerism (>90%) was achieved in bone marrow (BM) samples obtained from HBG1/2 promoter-base edited and unedited mouse treatment groups at 16 weeks post-transplantation. In addition, HBG1/2 gene promoter base editing reached >88% in bulk BM cells with increasing ABE8.8 mRNA dose. FIGS. 10A-10D demonstrate that HBG1/2 gene promoter-base edited human stem cells (HSCs) displayed long term (16 weeks), multi-lineage hematopoietic reconstitution in NBSGW mice (the NBSGW mouse model). Flow cytometry analyses were performed to identify phenotypic markers on human progenitor stem cells (HPSCs), human erythroid cells, human myeloid cells and human lymphoid cells (% cells of the different types) as shown. FIG. 11 demonstrates long term human hematopoietic, multi-lineage reconstitution in NBSGW mice at 16 weeks. The percent base editing of the various human hematopoietic cell subpopulations analyzed and the amounts of electroporated ABE mRNA and gRNA are shown. The amount of HBG1/2 gene promoter base editing achieved was shown to be similar in sorted human HPSCs (Lin−CD34+), human myeloid (CD15+), human lymphoid (CD19+) and human erythroid (GlyA+) cells at 16 weeks post-transplantation. The results shown in FIGS. 12A and 12B demonstrate that HBG1/2 gene promoter base editing was maintained long term (16 weeks) post-engraftment with elevated γ-globin levels in NBSGW mice. As shown in FIGS. 12A and B, HBG1/2 gene promoter A-to-G base editing reached >88% in bulk bone marrow cell samples at 16 weeks post-transplantation. In addition, >53% of gamma globin (γ-globin) protein levels were expressed in sorted, base edited, bone marrow-derived human erythroid cells compared to unedited BM-derived erythroid cells (<0.3%). The standard-error-of-the-mean (SEM) ranged from 0.001 to 0.022 in these experiments.

[0794] The use of unedited and base-edited donor cells for transplant and engraftment was compared in irradiated NSG (irrNSG) mice. Compared with unedited cells, edited cells transfected with ABE8.8 mRNA and HBG1/2 gRNA by electroporation retained base editing function over time, e.g., for at least 16 weeks. The base-edited donor cells were robust and functional and successfully engrafted in vivo in two mouse models, namely, the NBSGW and irrNSG mouse models as described herein. As demonstrated in FIGS. 13A and 13B, long term engraftment and HBG1/2 gene promoter base editing were retained in irradiated NSG (irrNSG) mice. Human cell chimerism was comparable in BM samples of HBG1/2 promoter base edited and unedited treatment groups at 16 weeks post-transplantation, i.e., long term engraftment (FIG. 13A). HBG1/2 gene promoter base editing reached >85% in bulk BM cells with increasing doses of ABE8.8 mRNA (FIG. 13B). FIGS. 14A-14C present results demonstrating that HBG1/2 gene promoter-edited HSCs also displayed long term, multi-lineage hematopoietic reconstitution in irrNSG mice in the irrNSG mouse model. FIG. 15 shows that comparable HBG1/2 gene promoter base editing was retained long term (16 weeks) in NBSGW and irrNSG mice. As observed in FIG. 15, similar HBG1/2 gene promoter base edited levels were detected in bulk bone marrow (BM) cells obtained from NBSGW (30 nM: 88.3±0.6%) mice and irrNSG (30 nM: 85.1±3.7%) mice at 16 weeks post-transplantation.

[0795] The results of the studies of dose titration of mRNA-encoded ABE8.8 (ABE8.8 mRNA) for HBG1/2 gene promoter base editing as described in this Example demonstrate that >85-88% of on-target base editing was attained following titration of mRNA (MRNA288) at doses from 1 nM to 30 nM. Similar base editing levels, human chimerism and multi-lineage human hematopoietic cell reconstitution were achieved in bulk bone marrow cells from NBSGW and irrNSG mice using mRNA encoding the ABE base editors that were assessed. In addition, on-target base editing using a 30 nM ABE8.8 mRNA dose resulted in >53% gamma globin (γ-globulin) protein induction in vivo in NBSGW bone marrow-derived human erythroid cells compared to the percent of γ-globulin protein induction (<0.3%) assessed in unedited cells. Moreover, similar on-target base editing levels were achieved in vivo in the various sorted bone marrow-derived hematopoietic cell sub-populations analyzed compared to the levels achieved in bulk bone marrow cells (16 weeks) for any of the ABE8.8 mRNA doses tested, mRNA material (GMP-like versus R&D grade) used, or mouse model NBSGW and irrNSG) tested, thus indicating that HBG1/2 gene promoter base editing in HSCs is maintained long-term in vivo.

[0796] FIG. 16 presents a schematic showing a further long term engraftment study that includes a secondary engraftment component. The study used the NBSGW mouse model as described above. Mice were transplanted with PB-CD34 cells (1×10⁶ cells) electroporated with ABE mRNA and gRNA Cell marker phenotype and % base editing analyses were performed on bone marrow cells obtained from the engrafted mice at 8 and 16 weeks post transplantation. After 16 weeks, mice were again injected with bone marrow cells (5×10⁶ cells) and bone marrow phenotype and % base editing were analyzed 8 weeks after the second injection. FIG. 16 shows graphs of chimerism, phenotype analysis and % base editing analyses of BM cells obtained from mice at 16+8 weeks post dose and demonstrates that the % of LIN-hCD34+ cells is consistent between unedited and the base-edited groups and that base editing persisted in secondary engraftment. Of note, for secondary transplantation of cells into mice as described herein, the animals did not require an ablation procedure, e.g., treatment with busulfan, to achieve engraftment of the base-edited donor cells. FIGS. 17A and 17B show the results of human BM chimerism (hCD45+/(hCD45++mCD45+)) and percent base editing in cells assessed from transplanted mice at week 13 of the dose titration study.

### Example 6. Characterization of Base-Edited CD34+ Cells Prior to In Vivo Transplantation, Electroporation and Transplant Studies

[0797] Prior to introduction and engraftment in recipient animals in the mouse models of the above-described Examples, donor human CD34+ cells were assessed for the expression of apoptosis, lineage and phenotype protein antigen markers by flow cytometry methods using specific, labeled anti-protein marker antibodies. The assessed lineage and phenotyping markers included the apoptosis markers Annexin V and 7-ADD. The assessed antigen markers included hCD45, mCD45, CD3, CD235a, CD19, CD34, CD15, CD33, and DAPI, and the assessed phenotyping antigen markers included hCD45, mCD45, CD45RA, CD90, CD34, CD15, CD38 and DAPI.

[0798] For the analyses, PBMCs were collected from a 31 year old male Caucasian donor and cryopreserved. Apoptosis was measured (using 7-AAD and Annexin V markers) in samples of freshly thawed, donor cells at 24 hours from the time of collecting cells (PBMCs) from the donor to the time of enriching CD34+ cells (“24 hr isolation”), e.g., using apheresis, from the collected PBMCs, and at 48+ hours from the time of collecting cells from the donor to the time of enriching CD34+ cells (“48+ hr isolation”). The assessment of apoptosis of donor cells was compared with that of peripheral blood mononuclear cells (PBMCs) as control (FIGS. 18A and 18B). The number of donor CD34+ cells assessed for apoptosis at 24 hr isolation was 6.75×10e8 CD34⁺ cells; the number of CD34+ cells assessed for apoptosis at 48+ hr isolation was 1.60×10e9 CD34⁺ cells. The 24 hr isolation CD34+ cell population analyzed was found to contain 96.3% live cells; the 48+ hr isolation CD34+ cell population analyzed was found to contain 96.7% live cells. Without wishing to be bound by theory, donor CD34+ cells are considered to be stem cells or stem-like cells, with stem cell properties and which have the potential to differentiate into other hemopoietic cell lineages. An apoptosis detection kit (BioLegend, Catalog #640926) was used for the Annexin V marker analysis. FIG. 18C graphically shows the locations of live cells (lower left quadrant of graph), dead cells (upper right quadrant of graph) and apoptotic cells (lower right quadrant of graph) following flow cytometry analysis using the BioLegend kit.

[0799] As used in the examples herein and as reflected in the drawings, 24 hr isolation or pre-enrichment refers to a 24 hour time period between collecting donor cells (PBMCs) from a donor to the time of isolating or enriching CD34+ cells, e.g., using apheresis, from the collected PBMCs (“24 hr isolation” or “24 hr pre-enrichment”), and 48+ hr isolation or pre-enrichment refers to a 48+ hour time period between collecting donor cells (PBMCs) from a donor to the time of isolating or enriching CD34+ cells from the collected PMBCs. (“48+ hr isolation” or “48+ hr pre-enrichment”). These time periods generally reflect the amount of time that donor cells (peripheral blood cells or PBMCs) are outside of the body prior to isolating or enriching for CD34+ cells (i.e., human stem cells or stem-like cells) for electroporation with mRNA encoding a base editor (e.g., ABE such as ABE8.8) and HBG1/2 gRNA. Cryopreservation of the donor cells and thawing of the cells for use prior to electroporation and base editing did not adversely affect the ability of the edited cells to engraft in in vivo mouse models following transplantation.

[0800] Apoptosis was also measured in CD34+ cells prior to electrophoresis (“Pre EP”) of the cells and following electrophoresis (“Post EP”). FIG. 19A shows the results of an apoptosis analysis performed on “Pre-EP” samples in which cells were cultured for 48+ hour post thawing after cryopreservation. FIG. 19B shows the measurement of apoptosis determined by flow cytometry analyses performed on different groups of “Post-EP” CD34+ cell samples enriched at 24 hr or 48+ hr (unedited versus base-edited CD34+ cells). FIG. 19C shows flow cytometry results of a lineage analysis performed on freshly thawed donor cells through 24 hr post electroporation using antibody reagents specific for the lineage markers analyzed.

[0801] Both small and large scale electroporation systems were used for the base editing studies. For small scale electroporation, an OC-400 (total volume 400 μL) cell electroporation cartridge is used; for large scale electroporation, a CL1.1 cell electroporation cartridge (total volume 3 mL) is used. Flow electroporation is performed using the MaxCyte instruments in conjunction with the small and large cartridges. For optimum base editing efficiency, cell viability, and base editing retention over time, CD34+ cells should be electroporated 24 to 48+ hours after collection from the donor and cryopreservation.

[0802] By way of example, a large scale process that resulted in an at least 16 week base editing retention in CD34+ cells electroporated with ABE8.8 mRNA and HBG1/2 gRNA involved the use of cryopreserved cells as starting material, Lonza X-vivo 10 containing glutamax supplement as cell culture medium; cells cultured for 48+ hours post electroporation as described herein; an OC-400 electroporation cell cartridge (prechilled) or a CL1.1 electroporation cell cartridge (ambient temperature) for flow electroporation using a MaxCyte instrument; a cell culture/cell transfer vessel or container which is a flask, a culture plate, or a conical cell culture tube (50 mL); a post electroporation incubation temperature for the electroporated cells of 37° C.; and a pre-electroporation cell process involving multiple centrifugations and washes at 4° C. such as described hereinabove.

[0803] A cell electroporation, transplant and engraftment study was performed based on the study design of FIG. 2. Table 23 below presents the study parameters.

TABLE 23

| | | | mRNA and | | Viability % |
|---|---|---|---|---|---|
| Group | Treatment | Timepoint | gRNA | Cell Source | at transplant |
| 1 | Unedited | N/A | N/A | 48+-Hr | 90 |
| 2 | OC-400 | Research | Research | Pre- | 91.7 |
| | | | | Enrichment | |
| | | | | Collection | |
| 3 | Unedited | N/A | N/A | 24-Hr | 93 |
| 4 | OC-400 | Research | Research | Pre- | 93.9 |
| 5 | CL-1.1 | Research | Research | Enrichment | 90.4 |
| | | | | Collection | |

[0804] The NBSGW mouse model was used for injection/transplant of base-edited CD34⁺ human cells and subsequent engraftment in the study. Transplanted cells were collected and evaluated at 8-weeks and 16-weeks post injection. At the 8-week evaluation, BM FACS (lineage and hematopoietic stem cell (HSC) phenotyping), bulk BM and Blood NGS, sorting of Lin⁻CD34+ cells, NGS were performed and cells were cultured. At the 16-week collection, BM FACS (lineage and hematopoietic stem cell (HSC) phenotyping), bulk BM and blood cell NGS, cell sorting based on (hCD15+ hCD19⁺, hCD34⁺ and GlyA⁺) cell markers, secondary engraftment from Groups 3, 4 and 5, cell culture and CFU analyses and GlyA+ for UPLC were carried out. FIG. 20A shows viability of the cells at pre-electroporation (Pre-EP), and at 24, 48 and 72 hours post electroporation. FIG. 20B shows the percent of base editing in the transplanted cells at the indicated time periods. FIG. 21A shows the percentage of enucleated cells (% DAPI−/NucRed−) after thawing the cells. FIG. 21B shows a growth curve of cells after thawing on days 0-14. The results demonstrate that both unedited cells and edited cells that were electroporated using small or large scale electroporation, and both the 24 and 48+ hour pre-enrichment of unedited or base-edited cells after thawing, showed nearly identical enucleation and cell growth.

[0805] The induction of gamma globin expression was demonstrated to be similar (about 60%) in base-edited cells following small scale electroporation and 48+ or 24 hour pre-enrichment and in base-edited cells following large scale electroporation and 24 hour pre-enrichment (FIG. 22A). The numbers of cell colonies (colony forming unit (CFU)) formed by thawed unedited CD34+ cells and base edited CD34+ cells that had undergone either small or large scale electroporation and 24 or 48+ hour pre-enrichment treatment were found to be similar (FIG. 22B). In addition, the numbers of different, specific colony forming unit cell types were also very similar among the aforementioned groups, namely, for CFUs such as burst-forming unit-erythroid (BFU-E) cells, which are the earliest precursor cells specific to the erythroid lineage; the CFU-GM, i.e., granulocyte-macrophage progenitor cells, which are precursors of monoblasts and myeloblasts: and CFU-GEMM (“Colony Forming Units-Granulocyte, Erythrocyte, Monocyte, Megakaryocyte”), which is a colony forming unit that generates myeloid cells. CFU-GEMM cells are the oligopotential progenitor cells for myeloid cells; thus, they are also known as common myeloid progenitor cells or myeloid stem cells. Red blood cells, white blood cells and platelets derive from CFU-GEMM.

[0806] The results from the study showed that at 8 weeks post dosing of animals with unedited or base-edited CD34+ cells, the percent human cell chimerism in mouse bone marrow (BM), (hCD45+/(hCD45++mCD45+), was high among the different cell treatment groups (FIG. 23A). As observed, based-edited CD34+ cells that had been electroporated under small scale (OC400) or large scale (CL1.1) electroporation conditions and subjected to either 24 or 48+ hour pre-enrichment conditions showed similar percent chimerism. The percentage of base editing (A to G) in input, bulk BM, CD34+/LIN−, and whole blood assessed at 8 weeks post-transplant was similar between base-edited CD34+ cells (24 hr pre-enrichment) electroporated under small and large scale conditions (FIG. 23B). FIGS. 24A-24D demonstrate that similar percentages of human donor cell chimerism in mouse bone marrow (BM), hCD15+ cells, GlyA+ cells and CD34+ human cells were detected in animals at 8 and 16 weeks post dosing with unedited or base-edited donor CD34+ cells, independent of the electroporation type or time of isolation/enrichment of CD34+ cells. Similar results were determined for assessments of chimerism, base editing percent and fetal globin reactivation after 16 weeks of engraftment (FIGS. 25A-25C). The engrafted, base edited cells showed fetal hemoglobin (HbF) upregulation.

[0807] The percent base editing in different cell phenotype and lineage subpopulations (i.e., GlyA+, CD15+, CD19+, LIN-CD34+, BM) as assessed at 16 weeks post dosing of unedited or base edited cells into animals was determined to be high, (approximately 80% or greater), for animals transplanted with base-edited CD34+ cells subjected to small scale electroporation (OC-400) (CD34+ cells isolated 24 hours from the time of collecting the human donor blood sample, “24 hr”) and for animals transplanted with base-edited CD34+ cells subjected to large scale electroporation (CL1.1) (CD34+ cells isolated 24 hours from the time of collecting the human donor blood sample, “24 hr”). (FIG. 26). Similar amounts of base editing were detected in each of the cell subtypes at 16 weeks following transplant of base-edited CD34+ cells that had been electroporated using either a small or large scale electroporation process, where the CD34+ cells were isolated 24 hours from the time of collecting the human donor blood sample, “24 hr”.

[0808] The results of the studies described in this Example demonstrate that cells, namely, CD34+ cells isolated within 24 hours post apheresis, engrafted in animals and retained base editing levels out to at least 16 weeks post transplantation. CD34+ cells isolated 48+ hours post apheresis engrafted but did not retain editing levels out to 16 weeks post transplantation (e.g., FIGS. 23B and 25B). The percent (%) Gamma/beta-like levels in 24-hour post apheresis groups were determined to be within the therapeutic range. Base editing levels of CD34+ cells electroporated using small and large scale electroporation methods, OC-400 and CL1.1, respectively, and retention are similar at 16 weeks post transplantation in NBSGW mice (the NBSGW mouse model).

[0809] As described in the above Examples, base-edited, transplanted donor cells successfully engrafted in recipient animals (e.g., the NBSGW mouse model) and were sustained in the animals for a long term period of at least 16 weeks or longer. Engraftment in the animals was achieved using edited donor cells (e.g., CD34+ cells) that were electroporated using both small and large scale electroporation procedures and using mRNA encoding the base editor, e.g., an adenosine deaminase-containing base editor, ABE8.8, and a guide RNA, e.g., HBG1/2 gRNA (g1). Long term engraftment and base editing (at least 16 weeks or longer) was demonstrated. No known off-target effects were detected using engrafted, edited donor cells transfected with mRNA encoding the adenosine base editor (e.g., ABE8/8) and a gRNA (g1) in the long term engraftment studies described herein. In addition, the base edited cells used for transplant and engraftment offer greater levels of efficacy and a better safety profile in animals, as the base editing function within the cells does not involve double stranded DNA breaks.

[0810] Without wishing to be bound by theory, the CD34+ cells (donor cells) used for base-editing and transplantation as described herein provide a higher quality and more robust starting cell population for transplantation and engraftment, as the CD34+ cells were enriched from donor PBMCs and electroporated with ABE (e.g., ABE8.8) mRNA and gRNA within a relatively short period of time before electroporation, base editing and in vivo transplantation, e.g., a 24 or 48+ hour period of time after collection and apheresis of the cells from the donor. In addition, a higher yield of viable, base-edited donor cells, which maintain stem cell like properties and functional activity, is provided by the cells and methods herein. The cells that were base-edited using the base editors and editing techniques described herein were demonstrated to be highly suitable for in vivo transplantation and long term engraftment versus other types of gene editing technologies, which frequently involve the use of different nucleases, induce DNA strand breaks and result in more off-target editing effects.

### Example 7. Engraftment Method

[0811] In vivo animal studies were conducted using healthy 5- to 7-week-old female NBSGW mice (Stock Number 026622, Jackson Laboratory). Procedures involving animals were reviewed and approved by the Institutional Animal Care and Use Committee (IACUC) at the Charles River CRADL Facility (IACUC Protocol CR-0071) and complied with all applicable sections of the Animal Welfare Act regulations (9 CFR), the Public Health Service Policy on Human Care and Use of Laboratory Animals, the Guide for the Care and Use of Laboratory Animals, and the standards set forth in the USDA Animal Welfare Act.

[0812] Female NBSGW mice were randomly assigned to groups as per the study design. On Day 0, mice were weighed prior to receiving 500 μL of a single intravenous (IV) injection of the test article (1×10e6 edited hCD34⁺ HPSCs) or control cells (1×10e6 unedited hCD34⁺ HPSCs) via the tail vein. Post-transplantation, the mice were observed daily for general health and weighed periodically throughout the study.

[0813] Mice were sacrificed at terminal timepoints per study design. To harvest bone marrow samples, the femur, tibia, and pelvic bones of the sacrificed mice were collected in IMDM/10% FBS. The total bone marrow was flushed and filtered using a 70 μm nylon strainer. The resulting bone marrow cell pellet was stored on ice until use.

### Other Embodiments

[0814] From the foregoing description, it will be apparent that variations and modifications may be made to the invention described herein to adopt it to various usages and conditions. Such embodiments are also within the scope of the following claims.

[0815] The recitation of a listing of elements in any definition of a variable herein includes definitions of that variable as any single element or combination (or subcombination) of listed elements. The recitation of an embodiment herein includes that embodiment as any single embodiment or in combination with any other embodiments or portions thereof.

[0816] All patents and publications mentioned in this specification are herein incorporated by reference to the same extent as if each independent patent and publication was specifically and individually indicated to be incorporated by reference.

1. A method of engrafting nucleobase-edited hematopoietic stem cells or progenitors thereof in a subject having a hemoglobinopathy, the method comprising:
(a) contacting hematopoietic stem cells or progenitors thereof in vitro with a guide RNA and a base editor comprising a polynucleotide programmable DNA binding domain and a deaminase domain, or a polynucleotide encoding the base editor, wherein the guide RNA targets the polynucleotide programmable DNA binding domain to induce a nucleobase change in a target hemoglobin (HBB) gene or in the promoter region of HBG1/2, thereby obtaining nucleobase-edited hematopoietic stem cells or progenitors thereof; and wherein the nucleobase-edited hematopoietic stem cells or progenitors thereof are contacted with the gRNA and the base editor within 48 hours following collection from a donor; and
(b) administering the nucleobase-edited hematopoietic stem cells or progenitors thereof to a subject in an effective amount to obtain engraftment of the nucleobase-edited hematopoietic stem cells or progenitors thereof in tissues of the subject after administration.

2. The method of claim 1, wherein the nucleobase-edited hematopoietic stem cells or progenitors thereof comprise CD34⁺ cells enriched from polymorphonuclear blood cells (PBMCs) collected from the donor.

3. A method of engrafting nucleobase-edited hematopoietic stem cells or progenitors thereof in a subject having a hemoglobinopathy or treating a hemoglobinopathy in a subject, the method comprising:
(a) contacting hematopoietic stem cells or progenitors thereof in vitro with a guide RNA and a base editor comprising a polynucleotide programmable DNA binding domain and a deaminase domain, or a polynucleotide encoding the base editor, wherein the guide RNA targets the polynucleotide programmable DNA binding domain to induce a nucleobase change in a target hemoglobin (HBB) gene or in the promoter region of HBG1/2, thereby obtaining nucleobase-edited hematopoietic stem cells or progenitors thereof; and
(b) administering the nucleobase-edited hematopoietic stem cells or progenitors thereof to a subject in an effective amount to obtain engraftment of the nucleobase-edited hematopoietic stem cells or progenitors thereof in tissues of the subject after administration.

4. (canceled)

5. The method of claim 1, wherein the nucleobase change is an A to G nucleobase change.

6. The method of claim 1, wherein the deaminase domain is an adenosine deaminase domain and shares at least 85% sequence identity with the sequence MSEVEFSHEYWMRHALTLAKRARDEREVPVGAVLVLNNRVIGEGWNRAIGLHDPTAHAEIMAL RQGGLVMQNYRLIDATLYVTFEPCVMCAGAMIHSRIGRVVFGVRNAKTGAAGSLMDVLHYPG MNHRVEITEGILADECAALLCYFFRMPRQVFNAQKKAQSSTD (SEQ ID NO: 3), and wherein the adenosine deaminase domain is capable of catalyzing the hydrolytic deamination of adenine or adenosine.

7-8. (canceled)

9. The method of claim 6, wherein the adenosine deaminase domain comprises a combination of alterations selected from the group consisting of:
Y147R, Q154R, and Y123H;
Y147R, Q154R, and I76Y;
Y147R, Q154R, and T166R;
Y147T and Q154R; Y147T and Q154S; and
Y123H, Y147R, Q154R, and I76Y.

10. (canceled)

11. The method of claim 1, wherein the deaminase domain is a TadA*8 variant.

12. The method of claim 11, wherein the TadA*8 variant is selected from the group consisting of: TadA*8.1, TadA*8.2, TadA*8.3, TadA*8.4, TadA*8.5, TadA*8.6, TadA*8.7, TadA*8.8, TadA*8.9, TadA*8.10, TadA*8.11, TadA*8.12, and TadA*8.13; and.
wherein the base editor is an ABE8 base editor selected from the group consisting of: ABE8.1, ABE8.2, ABE8.3, ABE8.4, ABE8.5, ABE8.6, ABE8.7, ABE8.8, ABE8.9, ABE8.10, ABE8.11, ABE8.12, and ABE13.

13. (canceled)

14. A method of engrafting nucleobase-edited hematopoietic stem cells or progenitors thereof in a subject having a hemoglobinopathy or treating a hemoglobinopathy in a subject, the method comprising:
(a) contacting hematopoietic stem cells or progenitors thereof in vitro with a guide RNA and an adenosine base editor comprising a polynucleotide programmable DNA binding domain and an adenosine deaminase domain comprising an amino acid sequence with at least 85% sequence identity to the sequence MSEVEFSHEYWMRHALTLAKRARDEREVPVGAVLVLNNRVIGEGWNRAIGLHDPTAHAEIMAL RQGGLVMQNYRLIDATLYVTFEPCVMCAGAMIHSRIGRVVFGVRNAKTGAAGSLMDVLHYPG MNHRVEITEGILADECAALLCYFFRMPRQVFNAQKKAQSSTD (SEQ ID NO: 3) and comprising the alterations Y123H, Y147R, and Q154R, or a polynucleotide encoding the base editor, wherein the adenosine deaminase domain catalyzes the hydrolytic deamination of adenine or adenosine, and wherein said guide RNA targets said polynucleotide programmable DNA binding domain to induce an A to G nucleobase change in a target hemoglobin (HBB) gene or in the promoter region of HBG1/2, thereby obtaining nucleobase-edited hematopoietic stem cells or progenitors thereof; and
(b) administering the nucleobase-edited hematopoietic stem cells or progenitors thereof to a subject in an effective amount to obtain engraftment of the nucleobase-edited hematopoietic stem cells or progenitors thereof in tissues of the subject after administration.

15. (canceled)

16. The method of claim 6, wherein the adenosine deaminase domain comprises an alteration at position 82 or 166.

17. The method of claim 16, wherein the alteration at position 82 is V82S and the alteration at position 166 is T166R.

18-21. (canceled)

22. The method of claim 1, wherein the polynucleotide programmable DNA binding domain is a Cas9.

23. The method of claim 22, wherein the Cas9 is a SpCas9, a SaCas9, or a variant thereof.

24-26. (canceled)

27. The method of claim 1, wherein the polynucleotide programmable DNA binding domain is a nickase.

28-31. (canceled)

32. A method of engrafting edited hematopoietic stem cells or progenitors thereof in a subject having a hemoglobinopathy or treating a subject having a hemoglobinopathy, the method comprising:
(a) contacting hematopoietic stem cells or progenitors thereof in vitro with a guide RNA and a base editor comprising an amino acid sequence with at least 80% sequence identity to one of the following two amino acid sequences: MSEVEFSHEYWMRHALTLAKRARDEREVPVGAVLVLNNRVIGEGWNRAIGLHDPTAHAEIMAL RQGGLVMQNYRLIDATLYVTFEPCVMCAGAMIHSRIGRVVFGVRNAKTGAAGSLMDVLHHPG MNHRVEITEGILADECAALLCRFFRMPRRVFNAQKKAQSSTDSGGSSGGSSGSETPGTSESATPES SGGSSGGSDKKYSIGLAIGTNSVGWAVITDEYKVPSKKFKVLGNTDRHSIKKNLIGALLFDSGET AEATRLKRTARRRYTRRKNRICYLQEIFSNEMAKVDDSFFHRLEESFLVEEDKKHERHPIFGNIVD EVAYHEKYPTIYHLRKKLVDSTDKADLRLIYLALAHMIKFRGHFLIEGDLNPDNSDVDKLFIQLV QTYNQLFEENPINASGVDAKAILSARLSKSRRLENLIAQLPGEKKNGLFGNLIALSLGLTPNFKSN FDLAEDAKLQLSKDTYDDDLDNLLAQIGDQYADLFLAAKNLSDAILLSDILRVNTEITKAPLSAS MIKRYDEHHQDLTLLKALVRQQLPEKYKEIFFDQSKNGYAGYIDGGASQEEFYKFIKPILEKMDG TEELLVKLNREDLLRKQRTFDNGSIPHQIHLGELHAILRRQEDFYPFLKDNREKIEKILTFRIPYYV GPLARGNSRFAWMTRKSEETITPWNFEEVVDKGASAQSFIERMTNFDKNLPNEKVLPKHSLLYE YFTVYNELTKVKYVTEGMRKPAFLSGEQKKAIVDLLFKTNRKVTVKQLKEDYFKKIECFDSVEIS GVEDRFNASLGTYHDLLKIIKDKDFLDNEENEDILEDIVLTLTLFEDREMIEERLKTYAHLFDDKV MKQLKRRRYTGWGRLSRKLINGIRDKQSGKTILDFLKSDGFANRNFMQLIHDDSLTFKEDIQKA QVSGQGDSLHEHIANLAGSPAIKKGILQTVKVVDELVKVMGRHKPENIVIEMARENQTITQKGQK NSRERMKRIEEGIKELGSQILKEHPVENTQLQNEKLYLYYLQNGRDMYVDQELDINRLSDYDVD HIVPQSFLKDDSIDNKVLTRSDKNRGKSDNVPSEEVVKKMKNYWRQLLNAKLITQRKFDNLTKA ERGGLSELDKAGFIKRQLVETRQITKHVAQILDSRMNTKYDENDKLIREVKVITLKSKLVSDFRK DFQFYKVREINNYHHAHDAYLNAVVGTALIKKYPKLESEFVYGDYKVYDVRKMIAKSEQEIGK ATAKYFFYSNIMNFFKTEITLANGEIRKRPLIETNGETGEIVWDKGRDFATVRKVLSMPQVNIVK KTEVQTGGFSKESILPKRNSDKLIARKKDWDPKKYGGFDSPTVAYSVLVVAKVEKGKSKKLKSV KELLGITIMERSSFEKNPIDFLEAKGYKEVKKDLIIKLPKYSLFELENGRKRMLASAGELQKGNEL ALPSKYVNFLYLASHYEKLKGSPEDNEQKQLFVEQHKHYLDEIIEQISEFSKRVILADANLDKVLS AYNKHRDKPIREQAENIIHLFTLTNLGAPAAFKYFDTIDRKRYTSTKEVLDATLIHQSITGLYETR IDLSQLGGDEGADKRTADGSEFESPKKKRKV (SEQ ID NO: 258), and MSEVEFSHEYWMRHALTLAKRAWDEREVPVGAVLVHNNRVIGEGWNRPIGRHDPTAHAEIMA LRQGGLVMQNYRLIDATLYVTLEPCVMCAGAMIHSRIGRVVFGARDAKTGAAGSLMDVLHHP GMNHRVEITEGILADECAALLSDFFRMRRQEIKAQKKAQSSTDSGGSSGGSSGSETPGTSESATPE SSGGSSGGSSEVEFSHEYWMRHALTLAKRARDEREVPVGAVLVLNNRVIGEGWNRAIGLHDPT AHAEIMALRQGGLVMQNYRLIDATLYVTFEPCVMCAGAMIHSRIGRVVFGVRNAKTGAAGSLM DVLHHPGMNHRVEITEGILADECAALLCRFFRMPRRVFNAQKKAQSSTDSGGSSGGSSGSETPGT SESATPESSGGSSGGSDKKYSIGLAIGTNSVGWAVITDEYKVPSKKFKVLGNTDRHSIKKNLIGAL LFDSGETAEATRLKRTARRRYTRRKNRICYLQEIFSNEMAKVDDSFFHRLEESFLVEEDKKHERH PIFGNIVDEVAYHEKYPTIYHLRKKLVDSTDKADLRLIYLALAHMIKFRGHFLIEGDLNPDNSDV DKLFIQLVQTYNQLFEENPINASGVDAKAILSARLSKSRRLENLIAQLPGEKKNGLFGNLIALSLG LTPNFKSNFDLAEDAKLQLSKDTYDDDLDNLLAQIGDQYADLFLAAKNLSDAILLSDILRVNTEI TKAPLSASMIKRYDEHHQDLTLLKALVRQQLPEKYKEIFFDQSKNGYAGYIDGGASQEEFYKFIK PILEKMDGTEELLVKLNREDLLRKQRTFDNGSIPHQIHLGELHAILRRQEDFYPFLKDNREKIEKIL TFRIPYYVGPLARGNSRFAWMTRKSEETITPWNFEEVVDKGASAQSFIERMTNFDKNLPNEKVLP KHSLLYEYFTVYNELTKVKYVTEGMRKPAFLSGEQKKAIVDLLFKTNRKVTVKQLKEDYFKKIE CFDSVEISGVEDRFNASLGTYHDLLKIIKDKDFLDNEENEDILEDIVLTLTLFEDREMIEERLKTYA HLFDDKVMKQLKRRRYTGWGRLSRKLINGIRDKQSGKTILDFLKSDGFANRNFMQLIHDDSLTF KEDIQKAQVSGQGDSLHEHIANLAGSPAIKKGILQTVKVVDELVKVMGRHKPENIVIEMARENQ TIQKGQKNSRERMKRIEEGIKELGSQILKEHPVENTQLQNEKLYLYYLQNGRDMYVDQELDINR LSDYDVDHIVPQSFLKDDSIDNKVLTRSDKNRGKSDNVPSEEVVKKMKNYWRQLLNAKLITQR KFDNLTKAERGGLSELDKAGFIKRQLVETRQITKHVAQILDSRMNTKYDENDKLIREVKVITLKS KLVSDFRKDFQFYKVREINNYHHAHDAYLNAVVGTALIKKYPKLESEFVYGDYKVYDVRKMIA KSEQEIGKATAKYFFYSNIMNFFKTEITLANGEIRKRPLIETNGETGEIVWDKGRDFATVRKVLSM PQVNIVKKTEVQTGGFSKESILPKRNSDKLIARKKDWDPKKYGGFDSPTVAYSVLVVAKVEKGK SKKLKSVKELLGITIMERSSFEKNPIDFLEAKGYKEVKKDLIIKLPKYSLFELENGRKRMLASAGE LQKGNELALPSKYVNFLYLASHYEKLKGSPEDNEQKQLFVEQHKHYLDEIIEQISEFSKRVILADA NLDKVLSAYNKHRDKPIREQAENIIHLFTLTNLGAPAAFKYFDTITIDRKRYTSTKEVLDATLIHQS ITGLYETRIDLSQLGGDEGADKRTADGSEFESPKKKRKV (SEQ ID NO: 259), or a polynucleotide encoding the base editor, wherein said guide RNA targets said polynucleotide programmable DNA binding domain to induce an A to G nucleobase change in the promoter region of HBG1/2, thereby obtaining edited hematopoietic stem cells or progenitors thereof;
(b) administering the nucleobase-edited hematopoietic stem cells or progenitors thereof to a subject in an effective amount to obtain engraftment of the nucleobase-edited hematopoietic stem cells or progenitors thereof in tissues of the subject after administration.

33-46. (canceled)

47. The method of claim 1, wherein the hematopoietic stem cells or progenitors thereof comprise a single-nucleotide polymorphism (SNP) associated with sickle cell disease (SCD).

48. The method of claim 47, wherein the SNP associated with SCD results in a E6V substitution in a hemoglobin beta unit encoded by the HBB gene.

49-54. (canceled)

55. The method of claim 1, wherein the nucleobase change results in a E6A substitution in the hemoglobin beta unit encoded by the HBB gene.

56-64. (canceled)

65. The method of claim 1, wherein levels of fetal hemoglobin (HbF) are increased in the subject following engraftment relative to the levels in a control subject that received unedited hematopoietic stem cells or progenitors thereof.

66-70. (canceled)

71. The method of claim 1, wherein the nucleobase-edited hematopoietic stem cells or progenitors thereof express HbF.

72-75. (canceled)

76. The method of claim 1, wherein the subject has sickle cell disease (SCD), thalassemia, and/or anemia.

77-80. (canceled)

81. The method of claim 1, wherein the nucleobase change abolishes, disrupts, or reduces BCL11A binding in the promoter region of HBG1/2.

82. (canceled)

83. The method of claim 1, wherein the nucleobase change is associated with an increase in expression of HBG1/2.

84-94. (canceled)

95. The method of claim 1, wherein the gRNA comprises or consists of the sequence, from 5′-3′:
GACCAAUAGCCUUGACAGUUUUAGAGCUAGAAAUAGCAAGUUAAAAUAAGGC
UAGUCCGUUAUCAACUUGAAAAAGUGGCACCGAGUCGGUGCU,
corresponding to bases 4-97 of SEQ ID NO: 129;
(SEQ ID NO: 129)
from 5′-3′: csususGACCAAUAGCCUUGACAGUUUUAGAGCUAGAAAU
AGCAAGUUAAAAUAAGGCUAGUCCGUUAUCAACUUGAAAAAGUGGCACCGAG
UCGGUGCUsususu,
wherein lowercase characters indicate 2′-O-methylated
nucleobases, and “s” indicates phosphorothioates
(SEQ ID NO: 129);
or
(SEO ID NO: 126)
gsascsUUCUCCACAGGAGUCAGGGUUUUAGAGCUAGAAAUAGCAAGUUAAA
AUAAGGCUAGUCCGUUAUUCAACUUGAAAAAGUGGCACCGAGUCGGUGCUsu
susu-3′,
(SEO ID NO: 127)
5′-ascsusUCUCCACAGGAGUCAGGGUUUUAGAGCUAGAAAUAGCAAGUUA
AAAUAAGGCUAGUCCGUUAUUCAACUUGAAAAAGUGGCACCGAGUCGGUGCU
sususu-3′,
and
(SEQ ID NO: 128)
5′-
csususCUCCACAGGAGUCAGGGUUUUAGAGCUAGAAAUAGCAAGUUAAAAU
AAGGCUAGUCCGUUAUUCAACUUGAAAAAGUGGCACCGAGUCGGUGCUsusu
su-3′,
wherein lowercase characters indicate 2′-O-methvlated
nucleobases, and “s” indicates phosphorothioates.

96-113. (canceled)

114. A kit for use in the method of claim 1, wherein the kit comprises the guide RNA and a polynucleotide encoding the base editor.

The application's sequence listing, which the Patent Office published only in electronic form, follows.

SEQUENCE LISTING (413 sequences)

SEQ ID NO: 1 - DNA, 628 bp, Homo sapiens
  misc_feature (1)..(628): Homo sapiens hemoglobin subunit beta (HBB), mRNA polynucleotide sequence
acatttgcttctgacacaactgtgttcactagcaacctcaaacagacaccatggtgcatctgactcctgaggagaagtctgccgttactgccctgtggggcaaggtgaacgtggatgaagttggtggtgaggccctgggcaggctgctggtggtctacccttggacccagaggttctttgagtcctttggggatctgtccactcctgatgctgttatgggcaaccctaaggtgaaggctcatggcaagaaagtgctcggtgcctttagtgatggcctggctcacctggacaacctcaagggcacctttgccacactgagtgagctgcactgtgacaagctgcacgtggatcctgagaacttcaggctcctgggcaacgtgctggtctgtgtgctggcccatcactttggcaaagaattcaccccaccagtgcaggctgcctatcagaaagtggtggctggtgtggctaatgccctggcccacaagtatcactaagctcgctttcttgctgtccaatttctattaaaggttcctttgttccctaagtccaactactaaactgggggatattatgaagggccttgagcatctggattctgcctaataaaaaacatttattttcattgcaa

SEQ ID NO: 2 - protein, 146 aa, Homo sapiens
  MISC_FEATURE (1)..(146): Homo sapiens hemoglobin subunit beta (HBB) polypeptide sequence
VHLTPEEKSAVTALWGKVNVDEVGGEALGRLLVVYPWTQRFFESFGDLSTPDAVMGNPKVKAHGKKVLGAFSDGLAHLDNLKGTFATLSELHCDKLHVDPENFRLLGNVLVCVLAHHFGKEFTPPVQAAYQKVVAGVANALAHKYH

SEQ ID NO: 3 - protein, 167 aa, Escherichia coli
  misc_feature (1)..(167): TadA*7.10 (ecTadA) polypeptide sequence
MSEVEFSHEYWMRHALTLAKRARDEREVPVGAVLVLNNRVIGEGWNRAIGLHDPTAHAEIMALRQGGLVMQNYRLIDATLYVTFEPCVMCAGAMIHSRIGRVVFGVRNAKTGAAGSLMDVLHYPGMNHRVEITEGILADECAALLCYFFRMPRQVFNAQKKAQSSTD

SEQ ID NO: 4 - DNA, 4092 bp, Artificial Sequence
  Description of artificial sequence: BhCas12b GGSGGS-ABE8-Xten20 at P153 polynucleotide sequence
  misc_feature (1)..(6): Kozak sequence
  misc_feature (7)..(57): Sequence encoding N-terminal nuclear localization signal
  misc_feature (58)..(513): Sequence encoding BhCas12b
  misc_feature (514)..(531): Sequence encoding a linker
  misc_feature (532)..(1029): Sequence encoding TadA*8
  misc_feature (1030)..(1089): Sequence encoding Xten20 linker
  misc_feature (1090)..(3954): Sequence encoding BhCas12b
  misc_feature (3955)..(4002): Sequence encoding C-terminal NLS
  misc_feature (4003)..(4008): Seqquence encoding GS linker
  misc_feature (4009)..(4089): Sequence encoding 3x hemagglutinin (HA) tag
gccaccatggccccaaagaagaagcggaaggtcggtatccacggagtcccagcagccgccaccagatccttcatcctgaagatcgagcccaacgaggaagtgaagaaaggcctctggaaaacccacgaggtgctgaaccacggaatcgcctactacatgaatatcctgaagctgatccggcaagaggccatctacgagcaccacgagcaggaccccaagaatcccaagaaggtgtccaaggccgagatccaggccgagctgtgggatttcgtgctgaagatgcagaagtgcaacagcttcacacacgaggtggacaaggacgaggtgttcaacatcctgagagagctgtacgaggaactggtgcccagcagcgtggaaaagaagggcgaagccaaccagctgagcaacaagtttctgtaccctctggtggaccccaacagccagtctggaaagggaacagccagcagcggcagaaagcccagatggtacaacctgaagattgccggcgatcccggaggctctggaggaagctccgaagtcgagttttcccatgagtactggatgagacacgcattgactctcgcaaagagggctcgagatgaacgcgaggtgcccgtgggggcagtactcgtgctcaacaatcgcgtaatcggcgaaggttggaatagggcaatcggactccacgaccccactgcacatgcggaaatcatggcccttcgacagggagggcttgtgatgcagaattatcgactttatgatgcgacgctgtacgtcacgtttgaaccttgcgtaatgtgcgcgggagctatgattcactcccgcattggacgagttgtattcggtgttcgcaacgccaagacgggtgccgcaggttcactgatggacgtgctgcatcatccaggcatgaaccaccgggtagaaatcacagaaggcatattggcggacgaatgtgcggcgctgttgtgtcgtttttttcgcatgcccaggcgggtctttaacgcccagaaaaaagcacaatcctctactgacggctcttctggatctgaaacacctggcacaagcgagagcgccacccctgagagctctggctcctgggaagaagagaagaagaagtgggaagaagataagaaaaaggacccgctggccaagatcctgggcaagctggctgagtacggactgatccctctgttcatcccctacaccgacagcaacgagcccatcgtgaaagaaatcaagtggatggaaaagtcccggaaccagagcgtgcggcggctggataaggacatgttcattcaggccctggaacggttcctgagctgggagagctggaacctgaaagtgaaagaggaatacgagaaggtcgagaaagagtacaagaccctggaagagaggatcaaagaggacatccaggctctgaaggctctggaacagtatgagaaagagcggcaagaacagctgctgcgggacaccctgaacaccaacgagtaccggctgagcaagagaggccttagaggctggcgggaaatcatccagaaatggctgaaaatggacgagaacgagccctccgagaagtacctggaagtgttcaaggactaccagcggaagcaccctagagaggccggcgattacagcgtgtacgagttcctgtccaagaaagagaaccacttcatctggcggaatcaccctgagtacccctacctgtacgccaccttctgcgagatcgacaagaaaaagaaggacgccaagcagcaggccaccttcacactggccgatcctatcaatcaccctctgtgggtccgattcgaggaaagaagcggcagcaacctgaacaagtacagaatcctgaccgagcagctgcacaccgagaagctgaagaaaaagctgacagtgcagctggaccggctgatctaccctacagaatctggcggctgggaagagaagggcaaagtggacattgtgctgctgcccagccggcagttctacaaccagatcttcctggacatcgaggaaaagggcaagcacgccttcacctacaaggatgagagcatcaagttccctctgaagggcacactcggcggagccagagtgcagttcgacagagatcacctgagaagataccctcacaaggtggaaagcggcaacgtgggcagaatctacttcaacatgaccgtgaacatcgagcctacagagtccccagtgtccaagtctctgaagatccaccgggacgacttccccaaggtggtcaacttcaagcccaaagaactgaccgagtggatcaaggacagcaagggcaagaaactgaagtccggcatcgagtccctggaaatcggcctgagagtgatgagcatcgacctgggacagagacaggccgctgccgcctctattttcgaggtggtggatcagaagcccgacatcgaaggcaagctgtttttcccaatcaagggcaccgagctgtatgccgtgcacagagccagcttcaacatcaagctgcccggcgagacactggtcaagagcagagaagtgctgcggaaggccagagaggacaatctgaaactgatgaaccagaagctcaacttcctgcggaacgtgctgcacttccagcagttcgaggacatcaccgagagagagaagcgggtcaccaagtggatcagcagacaagagaacagcgacgtgcccctggtgtaccaggatgagctgatccagatccgcgagctgatgtacaagccttacaaggactgggtcgccttcctgaagcagctccacaagagactggaagtcgagatcggcaaagaagtgaagcactggcggaagtccctgagcgacggaagaaagggcctgtacggcatctccctgaagaacatcgacgagatcgatcggacccggaagttcctgctgagatggtccctgaggcctaccgaacctggcgaagtgcgtagactggaacccggccagagattcgccatcgaccagctgaatcacctgaacgccctgaaagaagatcggctgaagaagatggccaacaccatcatcatgcacgccctgggctactgctacgacgtgcggaagaagaaatggcaggctaagaaccccgcctgccagatcatcctgttcgaggatctgagcaactacaacccctacgaggaaaggtcccgcttcgagaacagcaagctcatgaagtggtccagacgcgagatccccagacaggttgcactgcagggcgagatctatggcctgcaagtgggagaagtgggcgctcagttcagcagcagattccacgccaagacaggcagccctggcatcagatgtagcgtcgtgaccaaagagaagctgcaggacaatcggttcttcaagaatctgcagagagagggcagactgaccctggacaaaatcgccgtgctgaaagagggcgatctgtacccagacaaaggcggcgagaagttcatcagcctgagcaaggatcggaagtgcgtgaccacacacgccgacatcaacgccgctcagaacctgcagaagcggttctggacaagaacccacggcttctacaaggtgtactgcaaggcctaccaggtggacggccagaccgtgtacatccctgagagcaaggaccagaagcagaagatcatcgaagagttcggcgagggctacttcattctgaaggacggggtgtacgaatgggtcaacgccggcaagctgaaaatcaagaagggcagctccaagcagagcagcagcgagctggtggatagcgacatcctgaaagacagcttcgacctggcctccgagctgaaaggcgaaaagctgatgctgtacagggaccccagcggcaatgtgttccccagcgacaaatggatggccgctggcgtgttcttcggaaagctggaacgcatcctgatcagcaagctgaccaaccagtactccatcagcaccatcgaggacgacagcagcaagcagtctatgaaaaggccggcggccacgaaaaaggccggccaggcaaaaaagaaaaagggatcctacccatacgatgttccagattacgcttatccctacgacgtgcctgattatgcatacccatatgatgtccccgactatgcctaa

SEQ ID NO: 5 - protein, 1361 aa, Artificial Sequence
  Description of artificial sequence: BhCas12b GGSGGS-ABE8-Xten20 at P153 polypeptide sequence
MAPKKKRKVGIHGVPAAATRSFILKIEPNEEVKKGLWKTHEVLNHGIAYYMNILKLIRQEAIYEHHEQDPKNPKKVSKAEIQAELWDFVLKMQKCNSFTHEVDKDEVFNILRELYEELVPSSVEKKGEANQLSNKFLYPLVDPNSQSGKGTASSGRKPRWYNLKIAGDPGGSGGSSEVEFSHEYWMRHALTLAKRARDEREVPVGAVLVLNNRVIGEGWNRAIGLHDPTAHAEIMALRQGGLVMQNYRLYDATLYVTFEPCVMCAGAMIHSRIGRVVFGVRNAKTGAAGSLMDVLHHPGMNHRVEITEGILADECAALLCRFFRMPRRVFNAQKKAQSSTDGSSGSETPGTSESATPESSGSWEEEKKKWEEDKKKDPLAKILGKLAEYGLIPLFIPYTDSNEPIVKEIKWMEKSRNQSVRRLDKDMFIQALERFLSWESWNLKVKEEYEKVEKEYKTLEERIKEDIQALKALEQYEKERQEQLLRDTLNTNEYRLSKRGLRGWREIIQKWLKMDENEPSEKYLEVFKDYQRKHPREAGDYSVYEFLSKKENHFIWRNHPEYPYLYATFCEIDKKKKDAKQQATFTLADPINHPLWVRFEERSGSNLNKYRILTEQLHTEKLKKKLTVQLDRLIYPTESGGWEEKGKVDIVLLPSRQFYNQIFLDIEEKGKHAFTYKDESIKFPLKGTLGGARVQFDRDHLRRYPHKVESGNVGRIYFNMTVNIEPTESPVSKSLKIHRDDFPKVVNFKPKELTEWIKDSKGKKLKSGIESLEIGLRVMSIDLGQRQAAAASIFEVVDQKPDIEGKLFFPIKGTELYAVHRASFNIKLPGETLVKSREVLRKAREDNLKLMNQKLNFLRNVLHFQQFEDITEREKRVTKWISRQENSDVPLVYQDELIQIRELMYKPYKDWVAFLKQLHKRLEVEIGKEVKHWRKSLSDGRKGLYGISLKNIDEIDRTRKFLLRWSLRPTEPGEVRRLEPGQRFAIDQLNHLNALKEDRLKKMANTIIMHALGYCYDVRKKKWQAKNPACQIILFEDLSNYNPYEERSRFENSKLMKWSRREIPRQVALQGEIYGLQVGEVGAQFSSRFHAKTGSPGIRCSVVTKEKLQDNRFFKNLQREGRLTLDKIAVLKEGDLYPDKGGEKFISLSKDRKCVTTHADINAAQNLQKRFWTRTHGFYKVYCKAYQVDGQTVYIPESKDQKQKIIEEFGEGYFILKDGVYEWVNAGKLKIKKGSSKQSSSELVDSDILKDSFDLASELKGEKLMLYRDPSGNVFPSDKWMAAGVFFGKLERILISKLTNQYSISTIEDDSSKQSMKRPAATKKAGQAKKKKGSYPYDVPDYAYPYDVPDYAYPYDVPDYA

SEQ ID NO: 6 - DNA, 4092 bp, Artificial Sequence
  Description of artificial sequence: BhCas12b GGSGGS-ABE8-Xten20 at K255 polynucleotide sequence
  misc_feature (1)..(6): Kozak sequence
  misc_feature (7)..(57): Sequence encoding N-terminal nuclear localization signal (NLS)
  misc_feature (58)..(822): Sequence encoding BhCas12b
  misc_feature (823)..(840): Sequence encoding a linker
  misc_feature (841)..(1338): Sequence encoding TadA*8
  misc_feature (1339)..(1398): Sequence encoding Xten20 linker
  misc_feature (1399)..(3954): Sequence encoding BhCas12b
  misc_feature (3955)..(4002): Sequence encoding C-terminal NLS
  misc_feature (4003)..(4008): Sequence encoding a GS linker
  misc_feature (4009)..(4089): Sequence encoding 3x hemagglutinin (HA) tag
gccaccatggccccaaagaagaagcggaaggtcggtatccacggagtcccagcagccgccaccagatccttcatcctgaagatcgagcccaacgaggaagtgaagaaaggcctctggaaaacccacgaggtgctgaaccacggaatcgcctactacatgaatatcctgaagctgatccggcaagaggccatctacgagcaccacgagcaggaccccaagaatcccaagaaggtgtccaaggccgagatccaggccgagctgtgggatttcgtgctgaagatgcagaagtgcaacagcttcacacacgaggtggacaaggacgaggtgttcaacatcctgagagagctgtacgaggaactggtgcccagcagcgtggaaaagaagggcgaagccaaccagctgagcaacaagtttctgtaccctctggtggaccccaacagccagtctggaaagggaacagccagcagcggcagaaagcccagatggtacaacctgaagattgccggcgatccctcctgggaagaagagaagaagaagtgggaagaagataagaaaaaggacccgctggccaagatcctgggcaagctggctgagtacggactgatccctctgttcatcccctacaccgacagcaacgagcccatcgtgaaagaaatcaagtggatggaaaagtcccggaaccagagcgtgcggcggctggataaggacatgttcattcaggccctggaacggttcctgagctgggagagctggaacctgaaagtgaaagaggaatacgagaaggtcgagaaagagtacaagaccctggaagagaggatcaaaggaggctctggaggaagctccgaagtcgagttttcccatgagtactggatgagacacgcattgactctcgcaaagagggctcgagatgaacgcgaggtgcccgtgggggcagtactcgtgctcaacaatcgcgtaatcggcgaaggttggaatagggcaatcggactccacgaccccactgcacatgcggaaatcatggcccttcgacagggagggcttgtgatgcagaattatcgactttatgatgcgacgctgtacgtcacgtttgaaccttgcgtaatgtgcgcgggagctatgattcactcccgcattggacgagttgtattcggtgttcgcaacgccaagacgggtgccgcaggttcactgatggacgtgctgcatcatccaggcatgaaccaccgggtagaaatcacagaaggcatattggcggacgaatgtgcggcgctgttgtgtcgtttttttcgcatgcccaggcgggtctttaacgcccagaaaaaagcacaatcctctactgacggctcttctggatctgaaacacctggcacaagcgagagcgccacccctgagagctctggcgaggacatccaggctctgaaggctctggaacagtatgagaaagagcggcaagaacagctgctgcgggacaccctgaacaccaacgagtaccggctgagcaagagaggccttagaggctggcgggaaatcatccagaaatggctgaaaatggacgagaacgagccctccgagaagtacctggaagtgttcaaggactaccagcggaagcaccctagagaggccggcgattacagcgtgtacgagttcctgtccaagaaagagaaccacttcatctggcggaatcaccctgagtacccctacctgtacgccaccttctgcgagatcgacaagaaaaagaaggacgccaagcagcaggccaccttcacactggccgatcctatcaatcaccctctgtgggtccgattcgaggaaagaagcggcagcaacctgaacaagtacagaatcctgaccgagcagctgcacaccgagaagctgaagaaaaagctgacagtgcagctggaccggctgatctaccctacagaatctggcggctgggaagagaagggcaaagtggacattgtgctgctgcccagccggcagttctacaaccagatcttcctggacatcgaggaaaagggcaagcacgccttcacctacaaggatgagagcatcaagttccctctgaagggcacactcggcggagccagagtgcagttcgacagagatcacctgagaagataccctcacaaggtggaaagcggcaacgtgggcagaatctacttcaacatgaccgtgaacatcgagcctacagagtccccagtgtccaagtctctgaagatccaccgggacgacttccccaaggtggtcaacttcaagcccaaagaactgaccgagtggatcaaggacagcaagggcaagaaactgaagtccggcatcgagtccctggaaatcggcctgagagtgatgagcatcgacctgggacagagacaggccgctgccgcctctattttcgaggtggtggatcagaagcccgacatcgaaggcaagctgtttttcccaatcaagggcaccgagctgtatgccgtgcacagagccagcttcaacatcaagctgcccggcgagacactggtcaagagcagagaagtgctgcggaaggccagagaggacaatctgaaactgatgaaccagaagctcaacttcctgcggaacgtgctgcacttccagcagttcgaggacatcaccgagagagagaagcgggtcaccaagtggatcagcagacaagagaacagcgacgtgcccctggtgtaccaggatgagctgatccagatccgcgagctgatgtacaagccttacaaggactgggtcgccttcctgaagcagctccacaagagactggaagtcgagatcggcaaagaagtgaagcactggcggaagtccctgagcgacggaagaaagggcctgtacggcatctccctgaagaacatcgacgagatcgatcggacccggaagttcctgctgagatggtccctgaggcctaccgaacctggcgaagtgcgtagactggaacccggccagagattcgccatcgaccagctgaatcacctgaacgccctgaaagaagatcggctgaagaagatggccaacaccatcatcatgcacgccctgggctactgctacgacgtgcggaagaagaaatggcaggctaagaaccccgcctgccagatcatcctgttcgaggatctgagcaactacaacccctacgaggaaaggtcccgcttcgagaacagcaagctcatgaagtggtccagacgcgagatccccagacaggttgcactgcagggcgagatctatggcctgcaagtgggagaagtgggcgctcagttcagcagcagattccacgccaagacaggcagccctggcatcagatgtagcgtcgtgaccaaagagaagctgcaggacaatcggttcttcaagaatctgcagagagagggcagactgaccctggacaaaatcgccgtgctgaaagagggcgatctgtacccagacaaaggcggcgagaagttcatcagcctgagcaaggatcggaagtgcgtgaccacacacgccgacatcaacgccgctcagaacctgcagaagcggttctggacaagaacccacggcttctacaaggtgtactgcaaggcctaccaggtggacggccagaccgtgtacatccctgagagcaaggaccagaagcagaagatcatcgaagagttcggcgagggctacttcattctgaaggacggggtgtacgaatgggtcaacgccggcaagctgaaaatcaagaagggcagctccaagcagagcagcagcgagctggtggatagcgacatcctgaaagacagcttcgacctggcctccgagctgaaaggcgaaaagctgatgctgtacagggaccccagcggcaatgtgttccccagcgacaaatggatggccgctggcgtgttcttcggaaagctggaacgcatcctgatcagcaagctgaccaaccagtactccatcagcaccatcgaggacgacagcagcaagcagtctatgaaaaggccggcggccacgaaaaaggccggccaggcaaaaaagaaaaagggatcctacccatacgatgttccagattacgcttatccctacgacgtgcctgattatgcatacccatatgatgtccccgactatgcctaa

SEQ ID NO: 7 - protein, 1361 aa, Artificial Sequence
  Description of artificial sequence: BhCas12b GGSGGS-ABE8-Xten20 at K255 polypeptide sequence
MAPKKKRKVGIHGVPAAATRSFILKIEPNEEVKKGLWKTHEVLNHGIAYYMNILKLIRQEAIYEHHEQDPKNPKKVSKAEIQAELWDFVLKMQKCNSFTHEVDKDEVFNILRELYEELVPSSVEKKGEANQLSNKFLYPLVDPNSQSGKGTASSGRKPRWYNLKIAGDPSWEEEKKKWEEDKKKDPLAKILGKLAEYGLIPLFIPYTDSNEPIVKEIKWMEKSRNQSVRRLDKDMFIQALERFLSWESWNLKVKEEYEKVEKEYKTLEERIKGGSGGSSEVEFSHEYWMRHALTLAKRARDEREVPVGAVLVLNNRVIGEGWNRAIGLHDPTAHAEIMALRQGGLVMQNYRLYDATLYVTFEPCVMCAGAMIHSRIGRVVFGVRNAKTGAAGSLMDVLHHPGMNHRVEITEGILADECAALLCRFFRMPRRVFNAQKKAQSSTDGSSGSETPGTSESATPESSGEDIQALKALEQYEKERQEQLLRDTLNTNEYRLSKRGLRGWREIIQKWLKMDENEPSEKYLEVFKDYQRKHPREAGDYSVYEFLSKKENHFIWRNHPEYPYLYATFCEIDKKKKDAKQQATFTLADPINHPLWVRFEERSGSNLNKYRILTEQLHTEKLKKKLTVQLDRLIYPTESGGWEEKGKVDIVLLPSRQFYNQIFLDIEEKGKHAFTYKDESIKFPLKGTLGGARVQFDRDHLRRYPHKVESGNVGRIYFNMTVNIEPTESPVSKSLKIHRDDFPKVVNFKPKELTEWIKDSKGKKLKSGIESLEIGLRVMSIDLGQRQAAAASIFEVVDQKPDIEGKLFFPIKGTELYAVHRASFNIKLPGETLVKSREVLRKAREDNLKLMNQKLNFLRNVLHFQQFEDITEREKRVTKWISRQENSDVPLVYQDELIQIRELMYKPYKDWVAFLKQLHKRLEVEIGKEVKHWRKSLSDGRKGLYGISLKNIDEIDRTRKFLLRWSLRPTEPGEVRRLEPGQRFAIDQLNHLNALKEDRLKKMANTIIMHALGYCYDVRKKKWQAKNPACQIILFEDLSNYNPYEERSRFENSKLMKWSRREIPRQVALQGEIYGLQVGEVGAQFSSRFHAKTGSPGIRCSVVTKEKLQDNRFFKNLQREGRLTLDKIAVLKEGDLYPDKGGEKFISLSKDRKCVTTHADINAAQNLQKRFWTRTHGFYKVYCKAYQVDGQTVYIPESKDQKQKIIEEFGEGYFILKDGVYEWVNAGKLKIKKGSSKQSSSELVDSDILKDSFDLASELKGEKLMLYRDPSGNVFPSDKWMAAGVFFGKLERILISKLTNQYSISTIEDDSSKQSMKRPAATKKAGQAKKKKGSYPYDVPDYAYPYDVPDYAYPYDVPDYA

SEQ ID NO: 8 - DNA, 4092 bp, Artificial Sequence
  Description of artificial sequence: BhCas12b GGSGGS-ABE8-Xten20 at D306 polynucleotide sequence
  misc_feature (1)..(6): Kozak sequence
  misc_feature (7)..(57): Sequence encoding N-terminal nuclear localization signal (NLS)
  misc_feature (58)..(975): Sequence encoding BhCas12b
  misc_feature (976)..(993): Sequence encoding a linker
  misc_feature (994)..(1491): Sequence encoding TadA*8
  misc_feature (1492)..(1551): Sequence encoding Xten20 linker
  misc_feature (1552)..(3954): Sequence encoding BhCas12b
  misc_feature (3955)..(4002): Sequence encoding C-terminal NLS
  misc_feature (4003)..(4008): Sequence encoding a GS linker
  misc_feature (4009)..(4089): Sequence encoding 3x hemagglutinin (HA) tag
gccaccatggccccaaagaagaagcggaaggtcggtatccacggagtcccagcagccgccaccagatccttcatcctgaagatcgagcccaacgaggaagtgaagaaaggcctctggaaaacccacgaggtgctgaaccacggaatcgcctactacatgaatatcctgaagctgatccggcaagaggccatctacgagcaccacgagcaggaccccaagaatcccaagaaggtgtccaaggccgagatccaggccgagctgtgggatttcgtgctgaagatgcagaagtgcaacagcttcacacacgaggtggacaaggacgaggtgttcaacatcctgagagagctgtacgaggaactggtgcccagcagcgtggaaaagaagggcgaagccaaccagctgagcaacaagtttctgtaccctctggtggaccccaacagccagtctggaaagggaacagccagcagcggcagaaagcccagatggtacaacctgaagattgccggcgatccctcctgggaagaagagaagaagaagtgggaagaagataagaaaaaggacccgctggccaagatcctgggcaagctggctgagtacggactgatccctctgttcatcccctacaccgacagcaacgagcccatcgtgaaagaaatcaagtggatggaaaagtcccggaaccagagcgtgcggcggctggataaggacatgttcattcaggccctggaacggttcctgagctgggagagctggaacctgaaagtgaaagaggaatacgagaaggtcgagaaagagtacaagaccctggaagagaggatcaaagaggacatccaggctctgaaggctctggaacagtatgagaaagagcggcaagaacagctgctgcgggacaccctgaacaccaacgagtaccggctgagcaagagaggccttagaggctggcgggaaatcatccagaaatggctgaaaatggacggaggctctggaggaagctccgaagtcgagttttcccatgagtactggatgagacacgcattgactctcgcaaagagggctcgagatgaacgcgaggtgcccgtgggggcagtactcgtgctcaacaatcgcgtaatcggcgaaggttggaatagggcaatcggactccacgaccccactgcacatgcggaaatcatggcccttcgacagggagggcttgtgatgcagaattatcgactttatgatgcgacgctgtacgtcacgtttgaaccttgcgtaatgtgcgcgggagctatgattcactcccgcattggacgagttgtattcggtgttcgcaacgccaagacgggtgccgcaggttcactgatggacgtgctgcatcatccaggcatgaaccaccgggtagaaatcacagaaggcatattggcggacgaatgtgcggcgctgttgtgtcgtttttttcgcatgcccaggcgggtctttaacgcccagaaaaaagcacaatcctctactgacggctcttctggatctgaaacacctggcacaagcgagagcgccacccctgagagctctggcgagaacgagccctccgagaagtacctggaagtgttcaaggactaccagcggaagcaccctagagaggccggcgattacagcgtgtacgagttcctgtccaagaaagagaaccacttcatctggcggaatcaccctgagtacccctacctgtacgccaccttctgcgagatcgacaagaaaaagaaggacgccaagcagcaggccaccttcacactggccgatcctatcaatcaccctctgtgggtccgattcgaggaaagaagcggcagcaacctgaacaagtacagaatcctgaccgagcagctgcacaccgagaagctgaagaaaaagctgacagtgcagctggaccggctgatctaccctacagaatctggcggctgggaagagaagggcaaagtggacattgtgctgctgcccagccggcagttctacaaccagatcttcctggacatcgaggaaaagggcaagcacgccttcacctacaaggatgagagcatcaagttccctctgaagggcacactcggcggagccagagtgcagttcgacagagatcacctgagaagataccctcacaaggtggaaagcggcaacgtgggcagaatctacttcaacatgaccgtgaacatcgagcctacagagtccccagtgtccaagtctctgaagatccaccgggacgacttccccaaggtggtcaacttcaagcccaaagaactgaccgagtggatcaaggacagcaagggcaagaaactgaagtccggcatcgagtccctggaaatcggcctgagagtgatgagcatcgacctgggacagagacaggccgctgccgcctctattttcgaggtggtggatcagaagcccgacatcgaaggcaagctgtttttcccaatcaagggcaccgagctgtatgccgtgcacagagccagcttcaacatcaagctgcccggcgagacactggtcaagagcagagaagtgctgcggaaggccagagaggacaatctgaaactgatgaaccagaagctcaacttcctgcggaacgtgctgcacttccagcagttcgaggacatcaccgagagagagaagcgggtcaccaagtggatcagcagacaagagaacagcgacgtgcccctggtgtaccaggatgagctgatccagatccgcgagctgatgtacaagccttacaaggactgggtcgccttcctgaagcagctccacaagagactggaagtcgagatcggcaaagaagtgaagcactggcggaagtccctgagcgacggaagaaagggcctgtacggcatctccctgaagaacatcgacgagatcgatcggacccggaagttcctgctgagatggtccctgaggcctaccgaacctggcgaagtgcgtagactggaacccggccagagattcgccatcgaccagctgaatcacctgaacgccctgaaagaagatcggctgaagaagatggccaacaccatcatcatgcacgccctgggctactgctacgacgtgcggaagaagaaatggcaggctaagaaccccgcctgccagatcatcctgttcgaggatctgagcaactacaacccctacgaggaaaggtcccgcttcgagaacagcaagctcatgaagtggtccagacgcgagatccccagacaggttgcactgcagggcgagatctatggcctgcaagtgggagaagtgggcgctcagttcagcagcagattccacgccaagacaggcagccctggcatcagatgtagcgtcgtgaccaaagagaagctgcaggacaatcggttcttcaagaatctgcagagagagggcagactgaccctggacaaaatcgccgtgctgaaagagggcgatctgtacccagacaaaggcggcgagaagttcatcagcctgagcaaggatcggaagtgcgtgaccacacacgccgacatcaacgccgctcagaacctgcagaagcggttctggacaagaacccacggcttctacaaggtgtactgcaaggcctaccaggtggacggccagaccgtgtacatccctgagagcaaggaccagaagcagaagatcatcgaagagttcggcgagggctacttcattctgaaggacggggtgtacgaatgggtcaacgccggcaagctgaaaatcaagaagggcagctccaagcagagcagcagcgagctggtggatagcgacatcctgaaagacagcttcgacctggcctccgagctgaaaggcgaaaagctgatgctgtacagggaccccagcggcaatgtgttccccagcgacaaatggatggccgctggcgtgttcttcggaaagctggaacgcatcctgatcagcaagctgaccaaccagtactccatcagcaccatcgaggacgacagcagcaagcagtctatgaaaaggccggcggccacgaaaaaggccggccaggcaaaaaagaaaaagggatcctacccatacgatgttccagattacgcttatccctacgacgtgcctgattatgcatacccatatgatgtccccgactatgcctaa

SEQ ID NO: 9 - protein, 1361 aa, Artificial Sequence
  Description of artificial sequence: BhCas12b GGSGGS-ABE8-Xten20 at D306 polypeptide sequence
MAPKKKRKVGIHGVPAAATRSFILKIEPNEEVKKGLWKTHEVLNHGIAYYMNILKLIRQEAIYEHHEQDPKNPKKVSKAEIQAELWDFVLKMQKCNSFTHEVDKDEVFNILRELYEELVPSSVEKKGEANQLSNKFLYPLVDPNSQSGKGTASSGRKPRWYNLKIAGDPSWEEEKKKWEEDKKKDPLAKILGKLAEYGLIPLFIPYTDSNEPIVKEIKWMEKSRNQSVRRLDKDMFIQALERFLSWESWNLKVKEEYEKVEKEYKTLEERIKEDIQALKALEQYEKERQEQLLRDTLNTNEYRLSKRGLRGWREIIQKWLKMDGGSGGSSEVEFSHEYWMRHALTLAKRARDEREVPVGAVLVLNNRVIGEGWNRAIGLHDPTAHAEIMALRQGGLVMQNYRLYDATLYVTFEPCVMCAGAMIHSRIGRVVFGVRNAKTGAAGSLMDVLHHPGMNHRVEITEGILADECAALLCRFFRMPRRVFNAQKKAQSSTDGSSGSETPGTSESATPESSGENEPSEKYLEVFKDYQRKHPREAGDYSVYEFLSKKENHFIWRNHPEYPYLYATFCEIDKKKKDAKQQATFTLADPINHPLWVRFEERSGSNLNKYRILTEQLHTEKLKKKLTVQLDRLIYPTESGGWEEKGKVDIVLLPSRQFYNQIFLDIEEKGKHAFTYKDESIKFPLKGTLGGARVQFDRDHLRRYPHKVESGNVGRIYFNMTVNIEPTESPVSKSLKIHRDDFPKVVNFKPKELTEWIKDSKGKKLKSGIESLEIGLRVMSIDLGQRQAAAASIFEVVDQKPDIEGKLFFPIKGTELYAVHRASFNIKLPGETLVKSREVLRKAREDNLKLMNQKLNFLRNVLHFQQFEDITEREKRVTKWISRQENSDVPLVYQDELIQIRELMYKPYKDWVAFLKQLHKRLEVEIGKEVKHWRKSLSDGRKGLYGISLKNIDEIDRTRKFLLRWSLRPTEPGEVRRLEPGQRFAIDQLNHLNALKEDRLKKMANTIIMHALGYCYDVRKKKWQAKNPACQIILFEDLSNYNPYEERSRFENSKLMKWSRREIPRQVALQGEIYGLQVGEVGAQFSSRFHAKTGSPGIRCSVVTKEKLQDNRFFKNLQREGRLTLDKIAVLKEGDLYPDKGGEKFISLSKDRKCVTTHADINAAQNLQKRFWTRTHGFYKVYCKAYQVDGQTVYIPESKDQKQKIIEEFGEGYFILKDGVYEWVNAGKLKIKKGSSKQSSSELVDSDILKDSFDLASELKGEKLMLYRDPSGNVFPSDKWMAAGVFFGKLERILISKLTNQYSISTIEDDSSKQSMKRPAATKKAGQAKKKKGSYPYDVPDYAYPYDVPDYAYPYDVPDYA

SEQ ID NO: 10 - DNA, 4092 bp, Artificial Sequence
  Description of artificial sequence: BhCas12b GGSGGS-ABE8-Xten20 at D980 polynucleotide sequence
  misc_feature (1)..(6): Kozak sequence
  misc_feature (7)..(57): Sequence encoding N-terminal nuclear localization signal (NLS)
  misc_feature (58)..(2997): Sequence encoding BhCas12b
  misc_feature (2998)..(3015): Sequence encoding a linker
  misc_feature (3016)..(3513): Sequence encoding TadA*8
  misc_feature (3514)..(3573): Sequence encoding Xten20 linker
  misc_feature (3574)..(3954): Sequence encoding BhCas12b
  misc_feature (3955)..(4002): Sequence encoding C-terminal NLS
  misc_feature (4003)..(4008): Sequence encoding a GS linker
  misc_feature (4009)..(4089): Sequence encoding 3x hemagglutinin (HA) tag
gccaccatggccccaaagaagaagcggaaggtcggtatccacggagtcccagcagccgccaccagatccttcatcctgaagatcgagcccaacgaggaagtgaagaaaggcctctggaaaacccacgaggtgctgaaccacggaatcgcctactacatgaatatcctgaagctgatccggcaagaggccatctacgagcaccacgagcaggaccccaagaatcccaagaaggtgtccaaggccgagatccaggccgagctgtgggatttcgtgctgaagatgcagaagtgcaacagcttcacacacgaggtggacaaggacgaggtgttcaacatcctgagagagctgtacgaggaactggtgcccagcagcgtggaaaagaagggcgaagccaaccagctgagcaacaagtttctgtaccctctggtggaccccaacagccagtctggaaagggaacagccagcagcggcagaaagcccagatggtacaacctgaagattgccggcgatccctcctgggaagaagagaagaagaagtgggaagaagataagaaaaaggacccgctggccaagatcctgggcaagctggctgagtacggactgatccctctgttcatcccctacaccgacagcaacgagcccatcgtgaaagaaatcaagtggatggaaaagtcccggaaccagagcgtgcggcggctggataaggacatgttcattcaggccctggaacggttcctgagctgggagagctggaacctgaaagtgaaagaggaatacgagaaggtcgagaaagagtacaagaccctggaagagaggatcaaagaggacatccaggctctgaaggctctggaacagtatgagaaagagcggcaagaacagctgctgcgggacaccctgaacaccaacgagtaccggctgagcaagagaggccttagaggctggcgggaaatcatccagaaatggctgaaaatggacgagaacgagccctccgagaagtacctggaagtgttcaaggactaccagcggaagcaccctagagaggccggcgattacagcgtgtacgagttcctgtccaagaaagagaaccacttcatctggcggaatcaccctgagtacccctacctgtacgccaccttctgcgagatcgacaagaaaaagaaggacgccaagcagcaggccaccttcacactggccgatcctatcaatcaccctctgtgggtccgattcgaggaaagaagcggcagcaacctgaacaagtacagaatcctgaccgagcagctgcacaccgagaagctgaagaaaaagctgacagtgcagctggaccggctgatctaccctacagaatctggcggctgggaagagaagggcaaagtggacattgtgctgctgcccagccggcagttctacaaccagatcttcctggacatcgaggaaaagggcaagcacgccttcacctacaaggatgagagcatcaagttccctctgaagggcacactcggcggagccagagtgcagttcgacagagatcacctgagaagataccctcacaaggtggaaagcggcaacgtgggcagaatctacttcaacatgaccgtgaacatcgagcctacagagtccccagtgtccaagtctctgaagatccaccgggacgacttccccaaggtggtcaacttcaagcccaaagaactgaccgagtggatcaaggacagcaagggcaagaaactgaagtccggcatcgagtccctggaaatcggcctgagagtgatgagcatcgacctgggacagagacaggccgctgccgcctctattttcgaggtggtggatcagaagcccgacatcgaaggcaagctgtttttcccaatcaagggcaccgagctgtatgccgtgcacagagccagcttcaacatcaagctgcccggcgagacactggtcaagagcagagaagtgctgcggaaggccagagaggacaatctgaaactgatgaaccagaagctcaacttcctgcggaacgtgctgcacttccagcagttcgaggacatcaccgagagagagaagcgggtcaccaagtggatcagcagacaagagaacagcgacgtgcccctggtgtaccaggatgagctgatccagatccgcgagctgatgtacaagccttacaaggactgggtcgccttcctgaagcagctccacaagagactggaagtcgagatcggcaaagaagtgaagcactggcggaagtccctgagcgacggaagaaagggcctgtacggcatctccctgaagaacatcgacgagatcgatcggacccggaagttcctgctgagatggtccctgaggcctaccgaacctggcgaagtgcgtagactggaacccggccagagattcgccatcgaccagctgaatcacctgaacgccctgaaagaagatcggctgaagaagatggccaacaccatcatcatgcacgccctgggctactgctacgacgtgcggaagaagaaatggcaggctaagaaccccgcctgccagatcatcctgttcgaggatctgagcaactacaacccctacgaggaaaggtcccgcttcgagaacagcaagctcatgaagtggtccagacgcgagatccccagacaggttgcactgcagggcgagatctatggcctgcaagtgggagaagtgggcgctcagttcagcagcagattccacgccaagacaggcagccctggcatcagatgtagcgtcgtgaccaaagagaagctgcaggacaatcggttcttcaagaatctgcagagagagggcagactgaccctggacaaaatcgccgtgctgaaagagggcgatctgtacccagacaaaggcggcgagaagttcatcagcctgagcaaggatcggaagtgcgtgaccacacacgccgacatcaacgccgctcagaacctgcagaagcggttctggacaagaacccacggcttctacaaggtgtactgcaaggcctaccaggtggacggaggctctggaggaagctccgaagtcgagttttcccatgagtactggatgagacacgcattgactctcgcaaagagggctcgagatgaacgcgaggtgcccgtgggggcagtactcgtgctcaacaatcgcgtaatcggcgaaggttggaatagggcaatcggactccacgaccccactgcacatgcggaaatcatggcccttcgacagggagggcttgtgatgcagaattatcgactttatgatgcgacgctgtacgtcacgtttgaaccttgcgtaatgtgcgcgggagctatgattcactcccgcattggacgagttgtattcggtgttcgcaacgccaagacgggtgccgcaggttcactgatggacgtgctgcatcatccaggcatgaaccaccgggtagaaatcacagaaggcatattggcggacgaatgtgcggcgctgttgtgtcgtttttttcgcatgcccaggcgggtctttaacgcccagaaaaaagcacaatcctctactgacggctcttctggatctgaaacacctggcacaagcgagagcgccacccctgagagctctggcggccagaccgtgtacatccctgagagcaaggaccagaagcagaagatcatcgaagagttcggcgagggctacttcattctgaaggacggggtgtacgaatgggtcaacgccggcaagctgaaaatcaagaagggcagctccaagcagagcagcagcgagctggtggatagcgacatcctgaaagacagcttcgacctggcctccgagctgaaaggcgaaaagctgatgctgtacagggaccccagcggcaatgtgttccccagcgacaaatggatggccgctggcgtgttcttcggaaagctggaacgcatcctgatcagcaagctgaccaaccagtactccatcagcaccatcgaggacgacagcagcaagcagtctatgaaaaggccggcggccacgaaaaaggccggccaggcaaaaaagaaaaagggatcctacccatacgatgttccagattacgcttatccctacgacgtgcctgattatgcatacccatatgatgtccccgactatgcctaa

SEQ ID NO: 11 - protein, 1361 aa, Artificial Sequence
  Description of artificial sequence: BhCas12b GGSGGS-ABE8-Xten20 at D980 polypeptide sequence
MAPKKKRKVGIHGVPAAATRSFILKIEPNEEVKKGLWKTHEVLNHGIAYYMNILKLIRQEAIYEHHEQDPKNPKKVSKAEIQAELWDFVLKMQKCNSFTHEVDKDEVFNILRELYEELVPSSVEKKGEANQLSNKFLYPLVDPNSQSGKGTASSGRKPRWYNLKIAGDPSWEEEKKKWEEDKKKDPLAKILGKLAEYGLIPLFIPYTDSNEPIVKEIKWMEKSRNQSVRRLDKDMFIQALERFLSWESWNLKVKEEYEKVEKEYKTLEERIKEDIQALKALEQYEKERQEQLLRDTLNTNEYRLSKRGLRGWREIIQKWLKMDENEPSEKYLEVFKDYQRKHPREAGDYSVYEFLSKKENHFIWRNHPEYPYLYATFCEIDKKKKDAKQQATFTLADPINHPLWVRFEERSGSNLNKYRILTEQLHTEKLKKKLTVQLDRLIYPTESGGWEEKGKVDIVLLPSRQFYNQIFLDIEEKGKHAFTYKDESIKFPLKGTLGGARVQFDRDHLRRYPHKVESGNVGRIYFNMTVNIEPTESPVSKSLKIHRDDFPKVVNFKPKELTEWIKDSKGKKLKSGIESLEIGLRVMSIDLGQRQAAAASIFEVVDQKPDIEGKLFFPIKGTELYAVHRASFNIKLPGETLVKSREVLRKAREDNLKLMNQKLNFLRNVLHFQQFEDITEREKRVTKWISRQENSDVPLVYQDELIQIRELMYKPYKDWVAFLKQLHKRLEVEIGKEVKHWRKSLSDGRKGLYGISLKNIDEIDRTRKFLLRWSLRPTEPGEVRRLEPGQRFAIDQLNHLNALKEDRLKKMANTIIMHALGYCYDVRKKKWQAKNPACQIILFEDLSNYNPYEERSRFENSKLMKWSRREIPRQVALQGEIYGLQVGEVGAQFSSRFHAKTGSPGIRCSVVTKEKLQDNRFFKNLQREGRLTLDKIAVLKEGDLYPDKGGEKFISLSKDRKCVTTHADINAAQNLQKRFWTRTHGFYKVYCKAYQVDGGSGGSSEVEFSHEYWMRHALTLAKRARDEREVPVGAVLVLNNRVIGEGWNRAIGLHDPTAHAEIMALRQGGLVMQNYRLYDATLYVTFEPCVMCAGAMIHSRIGRVVFGVRNAKTGAAGSLMDVLHHPGMNHRVEITEGILADECAALLCRFFRMPRRVFNAQKKAQSSTDGSSGSETPGTSESATPESSGGQTVYIPESKDQKQKIIEEFGEGYFILKDGVYEWVNAGKLKIKKGSSKQSSSELVDSDILKDSFDLASELKGEKLMLYRDPSGNVFPSDKWMAAGVFFGKLERILISKLTNQYSISTIEDDSSKQSMKRPAATKKAGQAKKKKGSYPYDVPDYAYPYDVPDYAYPYDVPDYA

SEQ ID NO: 12 - DNA, 4092 bp, Artificial Sequence
  Description of artificial sequence: BhCas12b GGSGGS-ABE8-Xten20 at K1019 polynucleotide sequence
  misc_feature (1)..(6): Kozak sequence
  misc_feature (7)..(57): Sequence encoding N-terminal nuclear localization signal (NLS)
  misc_feature (58)..(3114): Sequence encoding BhCas12b
  misc_feature (3115)..(3132): Sequence encoding a linker
  misc_feature (3133)..(3630): Sequence encoding TadA*8
  misc_feature (3631)..(3690): Sequence encoding Xten20 linker
  misc_feature (3691)..(3954): Sequence encoding BhCas12b
  misc_feature (3955)..(4002): Sequence encoding C-terminal NLS
  misc_feature (4003)..(4008): Sequence encoding GS linker
  misc_feature (4009)..(4089): Sequence encoding 3x hemagglutinin (HA) tag
gccaccatggccccaaagaagaagcggaaggtcggtatccacggagtcccagcagccgccaccagatccttcatcctgaagatcgagcccaacgaggaagtgaagaaaggcctctggaaaacccacgaggtgctgaaccacggaatcgcctactacatgaatatcctgaagctgatccggcaagaggccatctacgagcaccacgagcaggaccccaagaatcccaagaaggtgtccaaggccgagatccaggccgagctgtgggatttcgtgctgaagatgcagaagtgcaacagcttcacacacgaggtggacaaggacgaggtgttcaacatcctgagagagctgtacgaggaactggtgcccagcagcgtggaaaagaagggcgaagccaaccagctgagcaacaagtttctgtaccctctggtggaccccaacagccagtctggaaagggaacagccagcagcggcagaaagcccagatggtacaacctgaagattgccggcgatccctcctgggaagaagagaagaagaagtgggaagaagataagaaaaaggacccgctggccaagatcctgggcaagctggctgagtacggactgatccctctgttcatcccctacaccgacagcaacgagcccatcgtgaaagaaatcaagtggatggaaaagtcccggaaccagagcgtgcggcggctggataaggacatgttcattcaggccctggaacggttcctgagctgggagagctggaacctgaaagtgaaagaggaatacgagaaggtcgagaaagagtacaagaccctggaagagaggatcaaagaggacatccaggctctgaaggctctggaacagtatgagaaagagcggcaagaacagctgctgcgggacaccctgaacaccaacgagtaccggctgagcaagagaggccttagaggctggcgggaaatcatccagaaatggctgaaaatggacgagaacgagccctccgagaagtacctggaagtgttcaaggactaccagcggaagcaccctagagaggccggcgattacagcgtgtacgagttcctgtccaagaaagagaaccacttcatctggcggaatcaccctgagtacccctacctgtacgccaccttctgcgagatcgacaagaaaaagaaggacgccaagcagcaggccaccttcacactggccgatcctatcaatcaccctctgtgggtccgattcgaggaaagaagcggcagcaacctgaacaagtacagaatcctgaccgagcagctgcacaccgagaagctgaagaaaaagctgacagtgcagctggaccggctgatctaccctacagaatctggcggctgggaagagaagggcaaagtggacattgtgctgctgcccagccggcagttctacaaccagatcttcctggacatcgaggaaaagggcaagcacgccttcacctacaaggatgagagcatcaagttccctctgaagggcacactcggcggagccagagtgcagttcgacagagatcacctgagaagataccctcacaaggtggaaagcggcaacgtgggcagaatctacttcaacatgaccgtgaacatcgagcctacagagtccccagtgtccaagtctctgaagatccaccgggacgacttccccaaggtggtcaacttcaagcccaaagaactgaccgagtggatcaaggacagcaagggcaagaaactgaagtccggcatcgagtccctggaaatcggcctgagagtgatgagcatcgacctgggacagagacaggccgctgccgcctctattttcgaggtggtggatcagaagcccgacatcgaaggcaagctgtttttcccaatcaagggcaccgagctgtatgccgtgcacagagccagcttcaacatcaagctgcccggcgagacactggtcaagagcagagaagtgctgcggaaggccagagaggacaatctgaaactgatgaaccagaagctcaacttcctgcggaacgtgctgcacttccagcagttcgaggacatcaccgagagagagaagcgggtcaccaagtggatcagcagacaagagaacagcgacgtgcccctggtgtaccaggatgagctgatccagatccgcgagctgatgtacaagccttacaaggactgggtcgccttcctgaagcagctccacaagagactggaagtcgagatcggcaaagaagtgaagcactggcggaagtccctgagcgacggaagaaagggcctgtacggcatctccctgaagaacatcgacgagatcgatcggacccggaagttcctgctgagatggtccctgaggcctaccgaacctggcgaagtgcgtagactggaacccggccagagattcgccatcgaccagctgaatcacctgaacgccctgaaagaagatcggctgaagaagatggccaacaccatcatcatgcacgccctgggctactgctacgacgtgcggaagaagaaatggcaggctaagaaccccgcctgccagatcatcctgttcgaggatctgagcaactacaacccctacgaggaaaggtcccgcttcgagaacagcaagctcatgaagtggtccagacgcgagatccccagacaggttgcactgcagggcgagatctatggcctgcaagtgggagaagtgggcgctcagttcagcagcagattccacgccaagacaggcagccctggcatcagatgtagcgtcgtgaccaaagagaagctgcaggacaatcggttcttcaagaatctgcagagagagggcagactgaccctggacaaaatcgccgtgctgaaagagggcgatctgtacccagacaaaggcggcgagaagttcatcagcctgagcaaggatcggaagtgcgtgaccacacacgccgacatcaacgccgctcagaacctgcagaagcggttctggacaagaacccacggcttctacaaggtgtactgcaaggcctaccaggtggacggccagaccgtgtacatccctgagagcaaggaccagaagcagaagatcatcgaagagttcggcgagggctacttcattctgaaggacggggtgtacgaatgggtcaacgccggcaagggaggctctggaggaagctccgaagtcgagttttcccatgagtactggatgagacacgcattgactctcgcaaagagggctcgagatgaacgcgaggtgcccgtgggggcagtactcgtgctcaacaatcgcgtaatcggcgaaggttggaatagggcaatcggactccacgaccccactgcacatgcggaaatcatggcccttcgacagggagggcttgtgatgcagaattatcgactttatgatgcgacgctgtacgtcacgtttgaaccttgcgtaatgtgcgcgggagctatgattcactcccgcattggacgagttgtattcggtgttcgcaacgccaagacgggtgccgcaggttcactgatggacgtgctgcatcatccaggcatgaaccaccgggtagaaatcacagaaggcatattggcggacgaatgtgcggcgctgttgtgtcgtttttttcgcatgcccaggcgggtctttaacgcccagaaaaaagcacaatcctctactgacggctcttctggatctgaaacacctggcacaagcgagagcgccacccctgagagctctggcctgaaaatcaagaagggcagctccaagcagagcagcagcgagctggtggatagcgacatcctgaaagacagcttcgacctggcctccgagctgaaaggcgaaaagctgatgctgtacagggaccccagcggcaatgtgttccccagcgacaaatggatggccgctggcgtgttcttcggaaagctggaacgcatcctgatcagcaagctgaccaaccagtactccatcagcaccatcgaggacgacagcagcaagcagtctatgaaaaggccggcggccacgaaaaaggccggccaggcaaaaaagaaaaagggatcctacccatacgatgttccagattacgcttatccctacgacgtgcctgattatgcatacccatatgatgtccccgactatgcctaa

SEQ ID NO: 13 - protein, 1361 aa, Artificial Sequence
  Description of artificial sequence: BhCas12b GGSGGS-ABE8-Xten20 at K1019 polypeptide sequence
MAPKKKRKVGIHGVPAAATRSFILKIEPNEEVKKGLWKTHEVLNHGIAYYMNILKLIRQEAIYEHHEQDPKNPKKVSKAEIQAELWDFVLKMQKCNSFTHEVDKDEVFNILRELYEELVPSSVEKKGEANQLSNKFLYPLVDPNSQSGKGTASSGRKPRWYNLKIAGDPSWEEEKKKWEEDKKKDPLAKILGKLAEYGLIPLFIPYTDSNEPIVKEIKWMEKSRNQSVRRLDKDMFIQALERFLSWESWNLKVKEEYEKVEKEYKTLEERIKEDIQALKALEQYEKERQEQLLRDTLNTNEYRLSKRGLRGWREIIQKWLKMDENEPSEKYLEVFKDYQRKHPREAGDYSVYEFLSKKENHFIWRNHPEYPYLYATFCEIDKKKKDAKQQATFTLADPINHPLWVRFEERSGSNLNKYRILTEQLHTEKLKKKLTVQLDRLIYPTESGGWEEKGKVDIVLLPSRQFYNQIFLDIEEKGKHAFTYKDESIKFPLKGTLGGARVQFDRDHLRRYPHKVESGNVGRIYFNMTVNIEPTESPVSKSLKIHRDDFPKVVNFKPKELTEWIKDSKGKKLKSGIESLEIGLRVMSIDLGQRQAAAASIFEVVDQKPDIEGKLFFPIKGTELYAVHRASFNIKLPGETLVKSREVLRKAREDNLKLMNQKLNFLRNVLHFQQFEDITEREKRVTKWISRQENSDVPLVYQDELIQIRELMYKPYKDWVAFLKQLHKRLEVEIGKEVKHWRKSLSDGRKGLYGISLKNIDEIDRTRKFLLRWSLRPTEPGEVRRLEPGQRFAIDQLNHLNALKEDRLKKMANTIIMHALGYCYDVRKKKWQAKNPACQIILFEDLSNYNPYEERSRFENSKLMKWSRREIPRQVALQGEIYGLQVGEVGAQFSSRFHAKTGSPGIRCSVVTKEKLQDNRFFKNLQREGRLTLDKIAVLKEGDLYPDKGGEKFISLSKDRKCVTTHADINAAQNLQKRFWTRTHGFYKVYCKAYQVDGQTVYIPESKDQKQKIIEEFGEGYFILKDGVYEWVNAGKGGSGGSSEVEFSHEYWMRHALTLAKRARDEREVPVGAVLVLNNRVIGEGWNRAIGLHDPTAHAEIMALRQGGLVMQNYRLYDATLYVTFEPCVMCAGAMIHSRIGRVVFGVRNAKTGAAGSLMDVLHHPGMNHRVEITEGILADECAALLCRFFRMPRRVFNAQKKAQSSTDGSSGSETPGTSESATPESSGLKIKKGSSKQSSSELVDSDILKDSFDLASELKGEKLMLYRDPSGNVFPSDKWMAAGVFFGKLERILISKLTNQYSISTIEDDSSKQSMKRPAATKKAGQAKKKKGSYPYDVPDYAYPYDVPDYAYPYDVPDYA

SEQ ID NO: 14 - protein, 208 aa, Petromyzon marinus
  MISC_FEATURE (1)..(208): tr|A5H718|A5H718_PETMA Cytosine deaminase OS=Petromyzon marinus OX=7757 PE=2 SV=1 amino acid sequence; PmCDA1 polypeptide sequence
MTDAEYVRIHEKLDIYTFKKQFFNNKKSVSHRCYVLFELKRRGERRACFWGYAVNKPQSGTERGIHAEIFSIRKVEEYLRDNPGQFTINWYSSWSPCADCAEKILEWYNQELRGNGHTLKIWACKLYYEKNARNQIGLWNLRDNGVGLNVMVSEHYQCCRKIFIQSSHNQLNENRWLEKTLKRAEKRRSELSIMIQVKILHTTKSPAV

SEQ ID NO: 15 - DNA, 766 bp, Petromyzon marinus
  misc_feature (1)..(766): EF094822.1 Petromyzon marinus isolate PmCDA.21 cytosine deaminase mRNA, complete cds; PmCDA1 polynucleotide sequence
tgacacgacacagccgtgtatatgaggaagggtagctggatggggggggggggaatacgttcagagaggacattagcgagcgtcttgttggtggccttgagtctagacacctgcagacatgaccgacgctgagtacgtgagaatccatgagaagttggacatctacacgtttaagaaacagtttttcaacaacaaaaaatccgtgtcgcatagatgctacgttctctttgaattaaaacgacggggtgaacgtagagcgtgtttttggggctatgctgtgaataaaccacagagcgggacagaacgtggaattcacgccgaaatctttagcattagaaaagtcgaagaatacctgcgcgacaaccccggacaattcacgataaattggtactcatcctggagtccttgtgcagattgcgctgaaaagatcttagaatggtataaccaggagctgcgggggaacggccacactttgaaaatctgggcttgcaaactctattacgagaaaaatgcgaggaatcaaattgggctgtggaacctcagagataacggggttgggttgaatgtaatggtaagtgaacactaccaatgttgcaggaaaatattcatccaatcgtcgcacaatcaattgaatgagaatagatggcttgagaagactttgaagcgagctgaaaaacgacggagcgagttgtccattatgattcaggtaaaaatactccacaccactaagagtcctgctgtttaagaggctatgcggatggttttc

SEQ ID NO: 16 - protein, 145 aa, Homo sapiens
  MISC_FEATURE (1)..(145): tr|Q6QJ80|Q6QJ80_HUMAN Activation-induced cytidine deaminase OS=Homo sapiens OX=9606 GN=AICDA PE=2 SV=1; AID polypeptide sequence
MDSLLMNRRKFLYQFKNVRWAKGRRETYLCYVVKRRDSATSFSLDFGYLRNKNGCHVELLFLRYISDWDLDPGRCYRVTWFTSWSPCYDCARHVADFLRGNPNLSLRIFTARLYFCEDRKAEPEGLRRLHRAGVQIAIMTFKAPV

SEQ ID NO: 17 - DNA, 10681 bp, Homo sapiens
  misc_feature (1)..(10681): NG_011588.1:5001-15681 Homo sapiens activation induced cytidine deaminase (AICDA), RefSeqGene (LRG_17) on chromosome 12; nucleic acid sequence of the CDS of human AID; polynucleotide sequence
agagaaccatcattaattgaagtgagatttttctggcctgagacttgcagggaggcaagaagacactctggacaccactatggacaggtaaagaggcagtcttctcgtgggtgattgcactggccttcctctcagagcaaatctgagtaatgagactggtagctatccctttctctcatgtaactgtctgactgataagatcagcttgatcaatatgcatatatattttttgatctgtctccttttcttctattcagatcttatacgctgtcagcccaattctttctgtttcagacttctcttgatttccctctttttcatgtggcaaaagaagtagtgcgtacaatgtactgattcgtcctgagatttgtaccatggttgaaactaatttatggtaataatattaacatagcaaatctttagagactcaaatcatgaaaaggtaatagcagtactgtactaaaaacggtagtgctaattttcgtaataattttgtaaatattcaacagtaaaacaacttgaagacacactttcctagggaggcgttactgaaataatttagctatagtaagaaaatttgtaattttagaaatgccaagcattctaaattaattgcttgaaagtcactatgattgtgtccattataaggagacaaattcattcaagcaagttatttaatgttaaaggcccaattgttaggcagttaatggcacttttactattaactaatctttccatttgttcagacgtagcttaacttacctcttaggtgtgaatttggttaaggtcctcataatgtctttatgtgcagtttttgataggttattgtcatagaacttattctattcctacatttatgattactatggatgtatgagaataacacctaatccttatactttacctcaatttaactcctttataaagaacttacattacagaataaagattttttaaaaatatatttttttgtagagacagggtcttagcccagccgaggctggtctctaagtcctggcccaagcgatcctcctgcctgggcctcctaaagtgctggaattatagacatgagccatcacatccaatatacagaataaagatttttaatggaggatttaatgttcttcagaaaattttcttgaggtcagacaatgtcaaatgtctcctcagtttacactgagattttgaaaacaagtctgagctataggtccttgtgaagggtccattggaaatacttgttcaaagtaaaatggaaagcaaaggtaaaatcagcagttgaaattcagagaaagacagaaaaggagaaaagatgaaattcaacaggacagaagggaaatatattatcattaaggaggacagtatctgtagagctcattagtgatggcaaaatgacttggtcaggattatttttaacccgcttgtttctggtttgcacggctggggatgcagctagggttctgcctcagggagcacagctgtccagagcagctgtcagcctgcaagcctgaaacactccctcggtaaagtccttcctactcaggacagaaatgacgagaacagggagctggaaacaggcccctaaccagagaagggaagtaatggatcaacaaagttaactagcaggtcaggatcacgcaattcatttcactctgactggtaacatgtgacagaaacagtgtaggcttattgtattttcatgtagagtaggacccaaaaatccacccaaagtcctttatctatgccacatccttcttatctatacttccaggacactttttcttccttatgataaggctctctctctctccacacacacacacacacacacacacacacacacacacacacacacaaacacacaccccgccaaccaaggtgcatgtaaaaagatgtagattcctctgcctttctcatctacacagcccaggagggtaagttaatataagagggatttattggtaagagatgatgcttaatctgtttaacactgggcctcaaagagagaatttcttttcttctgtacttattaagcacctattatgtgttgagcttatatatacaaagggttattatatgctaatatagtaatagtaatggtggttggtactatggtaattaccataaaaattattatccttttaaaataaagctaattattattggatcttttttagtattcattttatgttttttatgtttttgattttttaaaagacaatctcaccctgttacccaggctggagtgcagtggtgcaatcatagctttctgcagtcttgaactcctgggctcaagcaatcctcctgccttggcctcccaaagtgttgggatacagtcatgagccactgcatctggcctaggatccatttagattaaaatatgcattttaaattttaaaataatatggctaatttttaccttatgtaatgtgtatactggcaataaatctagtttgctgcctaaagtttaaagtgctttccagtaagcttcatgtacgtgaggggagacatttaaagtgaaacagacagccaggtgtggtggctcacgcctgtaatcccagcactctgggaggctgaggtgggtggatcgcttgagccctggagttcaagaccagcctgagcaacatggcaaaacgctgtttctataacaaaaattagccgggcatggtggcatgtgcctgtggtcccagctactagggggctgaggcaggagaatcgttggagcccaggaggtcaaggctgcactgagcagtgcttgcgccactgcactccagcctgggtgacaggaccagaccttgcctcaaaaaaataagaagaaaaattaaaaataaatggaaacaactacaaagagctgttgtcctagatgagctacttagttaggctgatattttggtatttaacttttaaagtcagggtctgtcacctgcactacattattaaaatatcaattctcaatgtatatccacacaaagactggtacgtgaatgttcatagtacctttattcacaaaaccccaaagtagagactatccaaatatccatcaacaagtgaacaaataaacaaaatgtgctatatccatgcaatggaataccaccctgcagtacaaagaagctacttggggatgaatcccaaagtcatgacgctaaatgaaagagtcagacatgaaggaggagataatgtatgccatacgaaattctagaaaatgaaagtaacttatagttacagaaagcaaatcagggcaggcatagaggctcacacctgtaatcccagcactttgagaggccacgtgggaagattgctagaactcaggagttcaagaccagcctgggcaacacagtgaaactccattctccacaaaaatgggaaaaaaagaaagcaaatcagtggttgtcctgtggggaggggaaggactgcaaagagggaagaagctctggtggggtgagggtggtgattcaggttctgtatcctgactgtggtagcagtttggggtgtttacatccaaaaatattcgtagaattatgcatcttaaatgggtggagtttactgtatgtaaattatacctcaatgtaagaaaaaataatgtgtaagaaaactttcaattctcttgccagcaaacgttattcaaattcctgagccctttacttcgcaaattctctgcacttctgccccgtaccattaggtgacagcactagctccacaaattggataaatgcatttctggaaaagactagggacaaaatccaggcatcacttgtgctttcatatcaaccatgctgtacagcttgtgttgctgtctgcagctgcaatggggactcttgatttctttaaggaaacttgggttaccagagtatttccacaaatgctattcaaattagtgcttatgatatgcaagacactgtgctaggagccagaaaacaaagaggaggagaaatcagtcattatgtgggaacaacatagcaagatatttagatcattttgactagttaaaaaagcagcagagtacaaaatcacacatgcaatcagtataatccaaatcatgtaaatatgtgcctgtagaaagactagaggaataaacacaagaatcttaacagtcattgtcattagacactaagtctaattattattattagacactatgatatttgagatttaaaaaatctttaatattttaaaatttagagctcttctatttttccatagtattcaagtttgacaatgatcaagtattactctttctttttttttttttttttttttttttgagatggagttttggtcttgttgcccatgctggagtggaatggcatgaccatagctcactgcaacctccacctcctgggttcaagcaaagctgtcgcctcagcctcccgggtagatgggattacaggcgcccaccaccacactcggctaatgtttgtatttttagtagagatggggtttcaccatgttggccaggctggtctcaaactcctgacctcagaggatccacctgcctcagcctcccaaagtgctgggattacagatgtaggccactgcgcccggccaagtattgctcttatacattaaaaaacaggtgtgagccactgcgcccagccaggtattgctcttatacattaaaaaataggccggtgcagtggctcacgcctgtaatcccagcactttgggaagccaaggcgggcagaacacccgaggtcaggagtccaaggccagcctggccaagatggtgaaaccccgtctctattaaaaatacaaacattacctgggcatgatggtgggcgcctgtaatcccagctactcaggaggctgaggcaggaggatccgcggagcctggcagatctgcctgagcctgggaggttgaggctacagtaagccaagatcatgccagtatacttcagcctgggcgacaaagtgagaccgtaacaaaaaaaaaaaaatttaaaaaaagaaatttagatcaagatccaactgtaaaaagtggcctaaacaccacattaaagagtttggagtttattctgcaggcagaagagaaccatcagggggtcttcagcatgggaatggcatggtgcacctggtttttgtgagatcatggtggtgacagtgtggggaatgttattttggagggactggaggcagacagaccggttaaaaggccagcacaacagataaggaggaagaagatgagggcttggaccgaagcagagaagagcaaacagggaaggtacaaattcaagaaatattggggggtttgaatcaacacatttagatgattaattaaatatgaggactgaggaataagaaatgagtcaaggatggttccaggctgctaggctgcttacctgaggtggcaaagtcgggaggagtggcagtttaggacagggggcagttgaggaatattgttttgatcattttgagtttgaggtacaagttggacacttaggtaaagactggaggggaaatctgaatatacaattatgggactgaggaacaagtttattttattttttgtttcgttttcttgttgaagaacaaatttaattgtaatcccaagtcatcagcatctagaagacagtggcaggaggtgactgtcttgtgggtaagggtttggggtccttgatgagtatctctcaattggccttaaatataagcaggaaaaggagtttatgatggattccaggctcagcagggctcaggagggctcaggcagccagcagaggaagtcagagcatcttctttggtttagcccaagtaatgacttccttaaaaagctgaaggaaaatccagagtgaccagattataaactgtactcttgcattttctctccctcctctcacccacagcctcttgatgaaccggaggaagtttctttaccaattcaaaaatgtccgctgggctaagggtcggcgtgagacctacctgtgctacgtagtgaagaggcgtgacagtgctacatccttttcactggactttggttatcttcgcaataaggtatcaattaaagtcggctttgcaagcagtttaatggtcaactgtgagtgcttttagagccacctgctgatggtattacttccatccttttttggcatttgtgtctctatcacattcctcaaatccttttttttatttctttttccatgtccatgcacccatattagacatggcccaaaatatgtgatttaattcctccccagtaatgctgggcaccctaataccactccttccttcagtgccaagaacaactgctcccaaactgtttaccagctttcctcagcatctgaattgcctttgagattaattaagctaaaagcatttttatatgggagaatattatcagcttgtccaagcaaaaattttaaatgtgaaaaacaaattgtgtcttaagcatttttgaaaattaaggaagaagaatttgggaaaaaattaacggtggctcaattctgtcttccaaatgatttcttttccctcctactcacatgggtcgtaggccagtgaatacattcaacatggtgatccccagaaaactcagagaagcctcggctgatgattaattaaattgatctttcggctacccgagagaattacatttccaagagacttcttcaccaaaatccagatgggtttacataaacttctgcccacgggtatctcctctctcctaacacgctgtgacgtctgggcttggtggaatctcagggaagcatccgtggggtggaaggtcatcgtctggctcgttgtttgatggttatattaccatgcaattttctttgcctacatttgtattgaatacatcccaatctccttcctattcggtgacatgacacattctatttcagaaggctttgattttatcaagcactttcatttacttctcatggcagtgcctattacttctcttacaatacccatctgtctgctttaccaaaatctatttccccttttcagatcctcccaaatggtcctcataaactgtcctgcctccacctagtggtccaggtatatttccacaatgttacatcaacaggcacttctagccattttccttctcaaaaggtgcaaaaagcaacttcataaacacaaattaaatcttcggtgaggtagtgtgatgctgcttcctcccaactcagcgcacttcgtcttcctcattccacaaaaacccatagccttccttcactctgcaggactagtgctgccaagggttcagctctacctactggtgtgctcttttgagcaagttgcttagcctctctgtaacacaaggacaatagctgcaagcatccccaaagatcattgcaggagacaatgactaaggctaccagagccgcaataaaagtcagtgaattttagcgtggtcctctctgtctctccagaacggctgccacgtggaattgctcttcctccgctacatctcggactgggacctagaccctggccgctgctaccgcgtcacctggttcacctcctggagcccctgctacgactgtgcccgacatgtggccgactttctgcgagggaaccccaacctcagtctgaggatcttcaccgcgcgcctctacttctgtgaggaccgcaaggctgagcccgaggggctgcggcggctgcaccgcgccggggtgcaaatagccatcatgaccttcaaaggtgcgaaagggccttccgcgcaggcgcagtgcagcagcccgcattcgggattgcgatgcggaatgaatgagttagtggggaagctcgaggggaagaagtgggcggggattctggttcacctctggagccgaaattaaagattagaagcagagaaaagagtgaatggctcagagacaaggccccgaggaaatgagaaaatggggccagggttgcttctttcccctcgatttggaacctgaactgtcttctacccccatatccccgcctttttttcctttttttttttttgaagattatttttactgctggaatacttttgtagaaaaccacgaaagaactttcaaagcctgggaagggctgcatgaaaattcagttcgtctctccagacagcttcggcgcatccttttggtaaggggcttcctcgctttttaaattttctttctttctctacagtcttttttggagtttcgtatatttcttatattttcttattgttcaatcactctcagttttcatctgatgaaaactttatttctcctccacatcagctttttcttctgctgtttcaccattcagagccctctgctaaggttccttttccctcccttttctttcttttgttgtttcacatctttaaatttctgtctctccccagggttgcgtttccttcctggtcagaattcttttctcctttttttttttttttttttttttttttaaacaaacaaacaaaaaacccaaaaaaactctttcccaatttactttcttccaacatgttacaaagccatccactcagtttagaagactctccggccccaccgacccccaacctcgttttgaagccattcactcaatttgcttctctctttctctacagcccctgtatgaggttgatgacttacgagacgcatttcgtactttgggactttgatagcaacttccaggaatgtcacacacgatgaaatatctctgctgaagacagtggataaaaaacagtccttcaagtcttctctgtttttattcttcaactctcactttcttagagtttacagaaaaaatatttatatacgactctttaaaaagatctatgtcttgaaaatagagaaggaacacaggtctggccagggacgtgctgcaattggtgcagttttgaatgcaacattgtcccctactgggaataacagaactgcaggacctgggagcatcctaaagtgtcaacgtttttctatgacttttaggtaggatgagagcagaaggtagatcctaaaaagcatggtgagaggatcaaatgtttttatatcaacatcctttattatttgattcatttgagttaacagtggtgttagtgatagatttttctattcttttcccttgacgtttactttcaagtaacacaaactcttccatcaggccatgatctataggacctcctaatgagagtatctgggtgattgtgaccccaaaccatctctccaaagcattaatatccaatcatgcgctgtatgttttaatcagcagaagcatgtttttatgtttgtacaaaagaagattgttatgggtggggatggaggtatagaccatgcatggtcaccttcaagctactttaataaaggatcttaaaatgggcaggaggactgtgaacaagacaccctaataatgggttgatgtctgaagtagcaaatcttctggaaacgcaaactcttttaaggaagtccctaatttagaaacacccacaaacttcacatatcataattagcaaacaattggaaggaagttgcttgaatgttggggagaggaaaatctattggctctcgtgggtctcttcatctcagaaatgccaatcaggtcaaggtttgctacattttgtatgtgtgtgatgcttctcccaaaggtatattaactatataagagagttgtgacaaaacagaatgataaagctgcgaaccgtggcacacgctcatagttctagctgcttgggaggttgaggagggaggatggcttgaacacaggtgttcaaggccagcctgggcaacataacaagatcctgtctctcaaaaaaaaaaaaaaaaaaaagaaagagagagggccgggcgtggtggctcacgcctgtaatcccagcactttgggaggccgagccgggcggatcacctgtggtcaggagtttgagaccagcctggccaacatggcaaaaccccgtctgtactcaaaatgcaaaaattagccaggcgtggtagcaggcacctgtaatcccagctacttgggaggctgaggcaggagaatcgcttgaacccaggaggtggaggttgcagtaagctgagatcgtgccgttgcactccagcctgggcgacaagagcaagactctgtctcagaaaaaaaaaaaaaaaagagagagagagagaaagagaacaatatttgggagagaaggatggggaagcattgcaaggaaattgtgctttatccaacaaaatgtaaggagccaataagggatccctatttgtctcttttggtgtctatttgtccctaacaactgtctttgacagtgagaaaaatattcagaataaccatatccctgtgccgttattacctagcaacccttgcaatgaagatgagcagatccacaggaaaacttgaatgcacaactgtcttattttaatcttattgtacataagtttgtaaaagagttaaaaattgttacttcatgtattcatttatattttatattattttgcgtctaatgattttttattaacatgatttccttttctgatatattgaaatggagtctcaaagcttcataaatttataactttagaaatgattctaataacaacgtatgtaattgtaacattgcagtaatggtgctacgaagccatttctcttgatttttagtaaacttttatgacagcaaatttgcttctggctcactttcaatcagttaaataaatgataaataattttggaagctgtgaagataaaataccaaataaaataatataaaagtgatttatatgaagttaaaataaaaaatcagtatgatggaataaacttg

SEQ ID NO: 18 - protein, 198 aa, Homo sapiens [sequence omitted]

SEQ ID NO: 19 - protein, 198 aa, Mus musculus
  MISC_FEATURE (1)..(198): mouse cytidine deaminase polypeptide sequence
  MISC_FEATURE (1)..(30): Nuclear localization sequence
  MISC_FEATURE (183)..(198): Nuclear export signal
MDSLLMKQKKFLYHFKNVRWAKGRHETYLCYVVKRRDSATSCSLDFGHLRNKSGCHVELLFLRYISDWDLDPGRCYRVTWFTSWSPCYDCARHVAEFLRWNPNLSLRIFTARLYFCEDRKAEPEGLRRLHRAGVQIGIMTFKDYFYCWNTFVENRERTFKAWEGLHENSVRLTRQLRRILLPLYEVDDLRDAFRMLGF

SEQ ID NO: 20 - protein, 198 aa, Canis lupus familiaris
  MISC_FEATURE (1)..(198): Canine AID (clAID) polypeptide sequence
  MISC_FEATURE (1)..(30): Nuclear localization sequence
  MISC_FEATURE (183)..(198): Nuclear export signal
MDSLLMKQRKFLYHFKNVRWAKGRHETYLCYVVKRRDSATSFSLDFGHLRNKSGCHVELLFLRYISDWDLDPGRCYRVTWFTSWSPCYDCARHVADFLRGYPNLSLRIFAARLYFCEDRKAEPEGLRRLHRAGVQIAIMTFKDYFYCWNTFVENREKTFKAWEGLHENSVRLSRQLRRILLPLYEVDDLRDAFRTLGL

SEQ ID NO: 21 - protein, 199 aa, Bos Taurus
  MISC_FEATURE (1)..(199): Bovine AID (btAID) polypeptide sequence
  MISC_FEATURE (1)..(30): Nuclear localization sequence
  MISC_FEATURE (183)..(199): Nuclear export signal
MDSLLKKQRQFLYQFKNVRWAKGRHETYLCYVVKRRDSPTSFSLDFGHLRNKAGCHVELLFLRYISDWDLDPGRCYRVTWFTSWSPCYDCARHVADFLRGYPNLSLRIFTARLYFCDKERKAEPEGLRRLHRAGVQIAIMTFKDYFYCWNTFVENHERTFKAWEGLHENSVRLSRQLRRILLPLYEVDDLRDAFRTLGL

SEQ ID NO: 22 - protein, 239 aa, Rattus
  MISC_FEATURE (1)..(239): Rat AID polypeptide sequence
  MISC_FEATURE (1)..(26): Nuclear localization sequence
  MISC_FEATURE (194)..(239): Nuclear export signal
MAVGSKPKAALVGPHWERERIWCFLCSTGLGTQQTGQTSRWLRPAATQDPVSPPRSLLMKQRKFLYHFKNVRWAKGRHETYLCYVVKRRDSATSFSLDFGYLRNKSGCHVELLFLRYISDWDLDPGRCYRVTWFTSWSPCYDCARHVADFLRGNPNLSLRIFTARLTGWGALPAGLMSPARPSDYFYCWNTFVENHERTFKAWEGLHENSVRLSRRLRRILLPLYEVDDLRDAFRTLGL

SEQ ID NO: 23 - protein, 198 aa, Mus musculus [sequence omitted]

SEQ ID NO: 24 - protein, 229 aa, Rattus norvegicus [sequence omitted]

SEQ ID NO: 25 - protein, 229 aa, Mesocricetus auratus
  MISC_FEATURE (1)..(229): maAPOBEC-1 polypeptide sequence
MSSETGPVVVDPTLRRRIEPHEFDAFFDQGELRKETCLLYEIRWGGRHNIWRHTGQNTSRHVEINFIEKFTSERYFYPSTRCSIVWFLSWSPCGECSKAITEFLSGHPNVTLFIYAARLYHHTDQRNRQGLRDLISRGVTIRIMTEQEYCYCWRNFVNYPPSNEVYWPRYPNLWMRLYALELYCIHLGLPPCLKIKRRHQYPLTFFRLNLQSCHYQRIPPHILWATGFI

SEQ ID NO: 26 - protein, 236 aa, Pongo pygmaeus
  MISC_FEATURE (1)..(236): ppAPOBEC-1 polypeptide sequence
MTSEKGPSTGDPTLRRRIESWEFDVFYDPRELRKETCLLYEIKWGMSRKIWRSSGKNTTNHVEVNFIKKFTSERRFHSSISCSITWFLSWSPCWECSQAIREFLSQHPGVTLVIYVARLFWHMDQRNRQGLRDLVNSGVTIQIMRASEYYHCWRNFVNYPPGDEAHWPQYPPLWMMLYALELHCIILSLPPCLKISRRWQNHLAFFRLHLQNCHYQTIPPHILLATGLIHPSVTWR

SEQ ID NO: 27 - protein, 236 aa, Oryctolagus cuniculus
  MISC_FEATURE (1)..(236): ocAPOBEC1 polypeptide sequence
MASEKGPSNKDYTLRRRIEPWEFEVFFDPQELRKEACLLYEIKWGASSKTWRSSGKNTTNHVEVNFLEKLTSEGRLGPSTCCSITWFLSWSPCWECSMAIREFLSQHPGVTLIIFVARLFQHMDRRNRQGLKDLVTSGVTVRVMSVSEYCYCWENFVNYPPGKAAQWPRYPPRWMLMYALELYCIILGLPPCLKISRRHQKQLTFFSLTPQYCHYKMIPPYILLATGLLQPSVPWR

SEQ ID NO: 28 - protein, 235 aa, Monodelphis domestica
  MISC_FEATURE (1)..(235): mdAPOBEC-1 polypeptide sequence
MNSKTGPSVGDATLRRRIKPWEFVAFFNPQELRKETCLLYEIKWGNQNIWRHSNQNTSQHAEINFMEKFTAERHFNSSVRCSITWFLSWSPCWECSKAIRKFLDHYPNVTLAIFISRLYWHMDQQHRQGLKELVHSGVTIQIMSYSEYHYCWRNFVDYPQGEEDYWPKYPYLWIMLYVLELHCIILGLPPCLKISGSHSNQLALFSLDLQDCHYQKIPYNVLVATGLVQPFVTWR

SEQ ID NO: 29 - protein, 224 aa, Pongo pygmaeus
  MISC_FEATURE (1)..(224): ppAPOBEC-2 polypeptide sequence
MAQKEEAAAATEAASQNGEDLENLDDPEKLKELIELPPFEIVTGERLPANFFKFQFRNVEYSSGRNKTFLCYVVEAQGKGGQVQASRGYLEDEHAAAHAEEAFFNTILPAFDPALRYNVTWYVSSSPCAACADRIIKTLSKTKNLRLLILVGRLFMWEELEIQDALKKLKEAGCKLRIMKPQDFEYVWQNFVEQEEGESKAFQPWEDIQENFLYYEEKLADILK

SEQ ID NO: 30 - protein, 224 aa, Bos Taurus
  MISC_FEATURE (1)..(224): btAPOBEC-2 polypeptide sequence
MAQKEEAAAAAEPASQNGEEVENLEDPEKLKELIELPPFEIVTGERLPAHYFKFQFRNVEYSSGRNKTFLCYVVEAQSKGGQVQASRGYLEDEHATNHAEEAFFNSIMPTFDPALRYMVTWYVSSSPCAACADRIVKTLNKTKNLRLLILVGRLFMWEEPEIQAALRKLKEAGCRLRIMKPQDFEYIWQNFVEQEEGESKAFEPWEDIQENFLYYEEKLADILK

SEQ ID NO: 31 - protein, 440 aa, Mus musculus
  MISC_FEATURE (1)..(440): mAPOBEC-3-(1) polypeptide sequence
MQPQRLGPRAGMGPFCLGCSHRKCYSPIRNLISQETFKFHFKNLGYAKGRKDTFLCYEVTRKDCDSPVSLHHGVFKNKDNIHAEICFLYWFHDKVLKVLSPREEFKITWYMSWSPCFECAEQIVRFLATHHNLSLDIFSSRLYNVQDPETQQNLCRLVQEGAQVAAMDLYEFKKCWKKFVDNGGRRFRPWKRLLTNFRYQDSKLQEILRPCYISVPSSSSSTLSNICLTKGLPETRFWVEGRRMDPLSEEEFYSQFYNQRVKHLCYYHRMKPYLCYQLEQFNGQAPLKGCLLSEKGKQHAEILFLDKIRSMELSQVTITCYLTWSPCPNCAWQLAAFKRDRPDLILHIYTSRLYFHWKRPFQKGLCSLWQSGILVDVMDLPQFTDCWTNFVNPKRPFWPWKGLEIISRRTQRRLRRIKESWGLQDLVNDFGNLQLGPPMS

SEQ ID NO: 32 - protein, 429 aa, Mus musculus
  MISC_FEATURE (1)..(429): APOBEC-3-(2) (Mouse APOBEC-3) polypeptide sequence
  MISC_FEATURE (71)..(108): Nucleic acid editing domain
  MISC_FEATURE (288)..(319): Nucleic acid editing domain
MGPFCLGCSHRKCYSPIRNLISQETFKFHFKNLGYAKGRKDTFLCYEVTRKDCDSPVSLHHGVFKNKDNIHAEICFLYWFHDKVLKVLSPREEFKITWYMSWSPCFECAEQIVRFLATHHNLSLDIFSSRLYNVQDPETQQNLCRLVQEGAQVAAMDLYEFKKCWKKFVDNGGRRFRPWKRLLTNFRYQDSKLQEILRPCYIPVPSSSSSTLSNICLTKGLPETRFCVEGRRMDPLSEEEFYSQFYNQRVKHLCYYHRMKPYLCYQLEQFNGQAPLKGCLLSEKGKQHAEILFLDKIRSMELSQVTITCYLTWSPCPNCAWQLAAFKRDRPDLILHIYTSRLYFHWKRPFQKGLCSLWQSGILVDVMDLPQFTDCWTNFVNPKRPFWPWKGLEIISRRTQRRLRRIKESWGLQDLVNDFGNLQLGPPMS

SEQ ID NO: 33 - protein, 430 aa, Rattus
  MISC_FEATURE (1)..(430): APOBEC-3 polypeptide sequence
  MISC_FEATURE (72)..(109): Nucleic acid editing domain
  MISC_FEATURE (289)..(320): Nucleic acid editing domain
MGPFCLGCSHRKCYSPIRNLISQETFKFHFKNRLRYAIDRKDTFLCYEVTRKDCDSPVSLHHGVFKNKDNIHAEICFLYWFHDKVLKVLSPREEFKITWYMSWSPCFECAEQVLRFLATHHNLSLDIFSSRLYNIRDPENQQNLCRLVQEGAQVAAMDLYEFKKCWKKFVDNGGRRFRPWKKLLTNFRYQDSKLQEILRPCYIPVPSSSSSTLSNICLTKGLPETRFCVERRRVHLLSEEEFYSQFYNQRVKHLCYYHGVKPYLCYQLEQFNGQAPLKGCLLSEKGKQHAEILFLDKIRSMELSQVIITCYLTWSPCPNCAWQLAAFKRDRPDLILHIYTSRLYFHWKRPFQKGLCSLWQSGILVDVMDLPQFTDCWTNFVNPKRPFWPWKGLEIISRRTQRRLHRIKESWGLQDLVNDFGNLQLGPPMS

SEQ ID NO: 34 - protein, 199 aa, Homo sapiens
  MISC_FEATURE (1)..(199): hAPOBEC-3A polypeptide sequence
  MISC_FEATURE (70)..(106): Nucleic acid editing domain
MEASPASGPRHLMDPHIFTSNFNNGIGRHKTYLCYEVERLDNGTSVKMDQHRGFLHNQAKNLLCGFYGRHAELRFLDLVPSLQLDPAQIYRVTWFISWSPCFSWGCAGEVRAFLQENTHVRLRIFAARIYDYDPLYKEALQMLRDAGAQVSIMTYDEFKHCWDTFVDHQGCPFQPWDGLDEHSQALSGRLRAILQNQGN

SEQ ID NO: 35 - protein, 373 aa, Homo sapiens
  MISC_FEATURE (1)..(373): hAPOBEC-3F polypeptide sequence
  MISC_FEATURE (65)..(99): Nucleic acid editing domain
  MISC_FEATURE (248)..(283): Nucleic acid editing domain
MKPHFRNTVERMYRDTFSYNFYNRPILSRRNTVWLCYEVKTKGPSRPRLDAKIFRGQVYSQPEHHAEMCFLSWFCGNQLPAYKCFQITWFVSWTPCPDCVAKLAEFLAEHPNVTLTISAARLYYYWERDYRRALCRLSQAGARVKIMDDEEFAYCWENFVYSEGQPFMPWYKFDDNYAFLHRTLKEILRNPMEAMYPHIFYFHFKNLRKAYGRNESWLCFTMEVVKHHSPVSWKRGVFRNQVDPETHCHAERCFLSWFCDDILSPNTNYEVTWYTSWSPCPECAGEVAEFLARHSNVNLTIFTARLYYFWDTDYQEGLRSLSQEGASVEIMGYKDFKYCWENFVYNDDEPFKPWKGLKYNFLFLDSKLQEILE

SEQ ID NO: 36 - protein, 370 aa, Rhesus macaque
  MISC_FEATURE (1)..(370): Rhesus macaque APOBEC-3G polypeptide sequence
  MISC_FEATURE (1)..(61): Cytoplasmic localization signal
MVEPMDPRTFVSNFNNRPILSGLNTVWLCCEVKTKDPSGPPLDAKIFQGKVYSKAKYHPEMRFLRWFHKWRQLHHDQEYKVTWYVSWSPCTRCANSVATFLAKDPKVTLTIFVARLYYFWKPDYQQALRILCQKRGGPHATMKIMNYNEFQDCWNKFVDGRGKPFKPRNNLPKHYTLLQATLGELLRHLMDPGTFTSNFNNKPWVSGQHETYLCYKVERLHNDTWVPLNQHRGFLRNQAPNIHGFPKGRHAELCFLDLIPFWKLDGQQYRVTCFTSWSPCFSCAQEMAKFISNNEHVSLCIFAARIYDDQGRYQEGLRALHRDGAKIAMMNYSEFEYCWDTFVDRQGRPFQPWDGLDEHSQALSGRLRAI

SEQ ID NO: 37 - protein, 384 aa, Pan troglodytes
  MISC_FEATURE (1)..(384): Chimpanzee APOBEC-3G polypeptide sequence
  MISC_FEATURE (1)..(60): Cytoplasmic localization signal
  MISC_FEATURE (65)..(100): Nucleic acid editing domain
  MISC_FEATURE (257)..(291): Nucleic acid editing domain
MKPHFRNPVERMYQDTFSDNFYNRPILSHRNTVWLCYEVKTKGPSRPPLDAKIFRGQVYSKLKYHPEMRFFHWFSKWRKLHRDQEYEVTWYISWSPCTKCTRDVATFLAEDPKVTLTIFVARLYYFWDPDYQEALRSLCQKRDGPRATMKIMNYDEFQHCWSKFVYSQRELFEPWNNLPKYYILLHIMLGEILRHSMDPPTFTSNFNNELWVRGRHETYLCYEVERLHNDTWVLLNQRRGFLCNQAPHKHGFLEGRHAELCFLDVIPFWKLDLHQDYRVTCFTSWSPCFSCAQEMAKFISNNKHVSLCIFAARIYDDQGRCQEGLRTLAKAGAKISIMTYSEFKHCWDTFVDHQGCPFQPWDGLEEHSQALSGRLRAILQNQGN

SEQ ID NO: 38 - protein, 377 aa, Chlorocebus sabaeus
  MISC_FEATURE (1)..(377): Green monkey APOBEC-3G polypeptide sequence
  MISC_FEATURE (1)..(60): Cytoplasmic localization signal
  MISC_FEATURE (65)..(100): Nucleic acid editing domain
  MISC_FEATURE (257)..(290): Nucleic acid editing domain
MNPQIRNMVEQMEPDIFVYYFNNRPILSGRNTVWLCYEVKTKDPSGPPLDANIFQGKLYPEAKDHPEMKFLHWFRKWRQLHRDQEYEVTWYVSWSPCTRCANSVATFLAEDPKVTLTIFVARLYYFWKPDYQQALRILCQERGGPHATMKIMNYNEFQHCWNEFVDGQGKPFKPRKNLPKHYTLLHATLGELLRHVMDPGTFTSNFNNKPWVSGQRETYLCYKVERSHNDTWVLLNQHRGFLRNQAPDRHGFPKGRHAELCFLDLIPFWKLDDQQYRVTCFTSWSPCFSCAQKMAKFISNNKHVSLCIFAARIYDDQGRCQEGLRTLHRDGAKIAVMNYSEFEYCWDTFVDRQGRPFQPWDGLDEHSQALSGRLRAI

SEQ ID NO: 39 - protein, 384 aa, Homo sapiens
  MISC_FEATURE (1)..(384): Human APOBEC-3G polypeptide sequence
  MISC_FEATURE (1)..(60): Cytoplasmic localization signal
  MISC_FEATURE (65)..(100): Nucleic acid editing domain
  MISC_FEATURE (257)..(291): Nucleic acid editing domain
MKPHFRNTVERMYRDTFSYNFYNRPILSRRNTVWLCYEVKTKGPSRPPLDAKIFRGQVYSELKYHPEMRFFHWFSKWRKLHRDQEYEVTWYISWSPCTKCTRDMATFLAEDPKVTLTIFVARLYYFWDPDYQEALRSLCQKRDGPRATMKIMNYDEFQHCWSKFVYSQRELFEPWNNLPKYYILLHIMLGEILRHSMDPPTFTFNFNNEPWVRGRHETYLCYEVERMHNDTWVLLNQRRGFLCNQAPHKHGFLEGRHAELCFLDVIPFWKLDLDQDYRVTCFTSWSPCFSCAQEMAKFISKNKHVSLCIFTARIYDDQGRCQEGLRTLAEAGAKISIMTYSEFKHCWDTFVDHQGCPFQPWDGLDEHSQDLSGRLRAILQNQEN

SEQ ID NO: 40 - protein, 382 aa, Homo sapiens
  MISC_FEATURE (1)..(382): Human APOBEC-3B polypeptide sequence
  MISC_FEATURE (66)..(100): Nucleic acid editing domain
  MISC_FEATURE (251)..(289): Nucleic acid editing domain
MNPQIRNPMERMYRDTFYDNFENEPILYGRSYTWLCYEVKIKRGRSNLLWDTGVFRGQVYFKPQYHAEMCFLSWFCGNQLPAYKCFQITWFVSWTPCPDCVAKLAEFLSEHPNVTLTISAARLYYYWERDYRRALCRLSQAGARVTIMDYEEFAYCWENFVYNEGQQFMPWYKFDENYAFLHRTLKEILRYLMDPDTFTFNFNNDPLVLRRRQTYLCYEVERLDNGTWVLMDQHMGFLCNEAKNLLCGFYGRHAELRFLDLVPSLQLDPAQIYRVTWFISWSPCFSWGCAGEVRAFLQENTHVRLRIFAARIYDYDPLYKEALQMLRDAGAQVSIMTYDEFEYCWDTFVYRQGCPFQPWDGLEEHSQALSGRLRAILQNQGN

SEQ ID NO: 41 - protein, 395 aa, Rattus
  MISC_FEATURE (1)..(395): Rat APOBEC-3B polypeptide sequence
MQPQGLGPNAGMGPVCLGCSHRRPYSPIRNPLKKLYQQTFYFHFKNVRYAWGRKNNFLCYEVNGMDCALPVPLRQGVFRKQGHIHAELCFIYWFHDKVLRVLSPMEEFKVTWYMSWSPCSKCAEQVARFLAAHRNLSLAIFSSRLYYYLRNPNYQQKLCRLIQEGVHVAAMDLPEFKKCWNKFVDNDGQPFRPWMRLRINFSFYDCKLQEIFSRMNLLREDVFYLQFNNSHRVKPVQNRYYRRKSYLCYQLERANGQEPLKGYLLYKKGEQHVEILFLEKMRSMELSQVRITCYLTWSPCPNCARQLAAFKKDHPDLILRIYTSRLYFWRKKFQKGLCTLWRSGIHVDVMDLPQFADCWTNFVNPQRPFRPWNELEKNSWRIQRRLRRIKESWGL

SEQ ID NO: 42 - protein, 226 aa, Bos Taurus
  MISC_FEATURE (1)..(226): Bovine APOBEC-3B polypeptide sequence
DGWEVAFRSGTVLKAGVLGVSMTEGWAGSGHPGQGACVWTPGTRNTMNLLREVLFKQQFGNQPRVPAPYYRRKTYLCYQLKQRNDLTLDRGCFRNKKQRHAERFIDKINSLDLNPSQSYKIICYITWSPCPNCANELVNFITRNNHLKLEIFASRLYFHWIKSFKMGLQDLQNAGISVAVMTHTEFEDCWEQFVDNQSRPFQPWDKLEQYSASIRRRLQRILTAPI

SEQ ID NO: 43 - protein, 490 aa, Pan troglodytes
  MISC_FEATURE (1)..(490): Chimpanzee APOBEC-3B polypeptide sequence
MNPQIRNPMEWMYQRTFYYNFENEPILYGRSYTWLCYEVKIRRGHSNLLWDTGVFRGQMYSQPEHHAEMCFLSWFCGNQLSAYKCFQITWFVSWTPCPDCVAKLAKFLAEHPNVTLTISAARLYYYWERDYRRALCRLSQAGARVKIMDDEEFAYCWENFVYNEGQPFMPWYKFDDNYAFLHRTLKEIIRHLMDPDTFTFNFNNDPLVLRRHQTYLCYEVERLDNGTWVLMDQHMGFLCNEAKNLLCGFYGRHAELRFLDLVPSLQLDPAQIYRVTWFISWSPCFSWGCAGQVRAFLQENTHVRLRIFAARIYDYDPLYKEALQMLRDAGAQVSIMTYDEFEYCWDTFVYRQGCPFQPWDGLEEHSQALSGRLRAILQVRASSLCMVPHRPPPPPQSPGPCLPLCSEPPLGSLLPTGRPAPSLPFLLTASFSFPPPASLPPLPSLSLSPGHLPVPSFHSLTSCSIQPPCSSRIRETEGWASVSKEGRDLG

SEQ ID NO: 44 - protein, 190 aa, Homo sapiens
  MISC_FEATURE (1)..(190): Human APOBEC-3C polypeptide sequence
  MISC_FEATURE (65)..(100): Nucleic acid editing domain
MNPQIRNPMKAMYPGTFYFQFKNLWEANDRNETWLCFTVEGIKRRSVVSWKTGVFRNQVDSETHCHAERCFLSWFCDDILSPNTKYQVTWYTSWSPCPDCAGEVAEFLARHSNVNLTIFTARLYYFQYPCYQEGLRSLSQEGVAVEIMDYEDFKYCWENFVYNDNEPFKPWKGLKTNFRLLKRRLRESLQ

SEQ ID NO: 45 - protein, 190 aa, Gorilla
  MISC_FEATURE (1)..(190): Gorilla APOBEC-3C polypeptide sequence
  MISC_FEATURE (65)..(100): Nucleic acid editing domain
MNPQIRNPMKAMYPGTFYFQFKNLWEANDRNETWLCFTVEGIKRRSVVSWKTGVFRNQVDSETHCHAERCFLSWECDDILSPNTNYQVTWYTSWSPCPECAGEVAEFLARHSNVNLTIFTARLYYFQDTDYQEGLRSLSQEGVAVKIMDYKDFKYCWENFVYNDDEPFKPWKGLKYNFRFLKRRLQEILE

SEQ ID NO: 46 - protein, 202 aa, Rhesus macaque
  MISC_FEATURE (1)..(202): Rhesus macaque APOBEC-3A polypeptide sequence
  MISC_FEATURE (72)..(103): Nucleic acid editing domain
MDGSPASRPRHLMDPNTFTFNFNNDLSVRGRHQTYLCYEVERLDNGTWVPMDERRGFLCNKAKNVPCGDYGCHVELRFLCEVPSWQLDPAQTYRVTWFISWSPCFRRGCAGQVRVFLQENKHVRLRIFAARIYDYDPLYQEALRTLRDAGAQVSIMTYEEFKHCWDTFVDRQGRPFQPWDGLDEHSQALSGRLRAILQNQGN

SEQ ID NO: 47 - protein, 185 aa, Bos Taurus
  MISC_FEATURE (1)..(185): Bovine APOBEC-3A polypeptide sequence
  MISC_FEATURE (56)..(86): Nucleic acid editing domain
MDEYTFTENFNNQGWPSKTYLCYEMERLDGDATIPLDEYKGFVRNKGLDQPEKPCHAELYFLGKIHSWNLDRNQHYRLTCFISWSPCYDCAQKLTTFLKENHHISLHILASRIYTHNRFGCHQSGLCELQAAGARITIMTFEDFKHCWETFVDHKGKPFQPWEGLNVKSQALCTELQAILKTQQN

SEQ ID NO: 48 - protein, 200 aa, Homo sapiens
  MISC_FEATURE (1)..(200): Human APOBEC-3H polypeptide sequence
  MISC_FEATURE (54)..(88): Nucleic acid editing domain
MALLTAETFRLQFNNKRRLRRPYYPRKALLCYQLTPQNGSTPTRGYFENKKKCHAEICFINEIKSMGLDETQCYQVTCYLTWSPCSSCAWELVDFIKAHDHLNLGIFASRLYYHWCKPQQKGLRLLCGSQVPVEVMGFPKFADCWENFVDHEKPLSFNPYKMLEELDKNSRAIKRRLERIKIPGVRAQGRYMDILCDAEV

SEQ ID NO: 49 - protein, 210 aa, Rhesus macaque
  MISC_FEATURE (1)..(210): Rhesus macaque APOBEC-3H polypeptide sequence
MALLTAKTFSLQFNNKRRVNKPYYPRKALLCYQLTPQNGSTPTRGHLKNKKKDHAEIRFINKIKSMGLDETQCYQVTCYLTWSPCPSCAGELVDFIKAHRHLNLRIFASRLYYHWRPNYQEGLLLLCGSQVPVEVMGLPEFTDCWENFVDHKEPPSFNPSEKLEELDKNSQAIKRRLERIKSRSVDVLENGLRSLQLGPVTPSSSIRNSR

SEQ ID NO: 50 - protein, 386 aa, Homo sapiens
  MISC_FEATURE (1)..(386): Human APOBEC-3D polypeptide sequence
  MISC_FEATURE (78)..(109): Nucleic acid editing domain
  MISC_FEATURE (262)..(296): Nucleic acid editing domain
MNPQIRNPMERMYRDTFYDNFENEPILYGRSYTWLCYEVKIKRGRSNLLWDTGVFRGPVLPKRQSNHRQEVYFRFENHAEMCFLSWFCGNRLPANRRFQITWFVSWNPCLPCVVKVTKFLAEHPNVTLTISAARLYYYRDRDWRWVLLRLHKAGARVKIMDYEDFAYCWENFVCNEGQPFMPWYKFDDNYASLHRTLKEILRNPMEAMYPHIFYFHFKNLLKACGRNESWLCFTMEVTKHHSAVFRKRGVFRNQVDPETHCHAERCFLSWFCDDILSPNTNYEVTWYTSWSPCPECAGEVAEFLARHSNVNLTIFTARLCYFWDTDYQEGLCSLSQEGASVKIMGYKDFVSCWKNFVYSDDEPFKPWKGLQTNFRLLKRRLREILQ

SEQ ID NO: 51 - protein, 236 aa, Homo sapiens
  MISC_FEATURE (1)..(236): Human APOBEC-1 polypeptide sequence
MTSEKGPSTGDPTLRRRIEPWEFDVFYDPRELRKEACLLYEIKWGMSRKIWRSSGKNTTNHVEVNFIKKFTSERDFHPSMSCSITWFLSWSPCWECSQAIREFLSRHPGVTLVIYVARLFWHMDQQNRQGLRDLVNSGVTIQIMRASEYYHCWRNFVNYPPGDEAHWPQYPPLWMMLYALELHCIILSLPPCLKISRRWQNHLTFFRLHLQNCHYQTIPPHILLATGLIHPSVAWR

SEQ ID NO: 52 - protein, 229 aa, Mus musculus
  MISC_FEATURE (1)..(229): Mouse APOBEC-1 polypeptide sequence
MSSETGPVAVDPTLRRRIEPHEFEVFFDPRELRKETCLLYEINWGGRHSVWRHTSQNTSNHVEVNFLEKFTTERYFRPNTRCSITWFLSWSPCGECSRAITEFLSRHPYVTLFIYIARLYHHTDQRNRQGLRDLISSGVTIQIMTEQEYCYCWRNFVNYPPSNEAYWPRYPHLWVKLYVLELYCIILGLPPCLKILRRKQPQLTFFTITLQTCHYQRIPPHLLWATGLK

SEQ ID NO: 53 - protein, 224 aa, Homo sapiens
  MISC_FEATURE (1)..(224): Human APOBEC-2 polypeptide sequence
MAQKEEAAVATEAASQNGEDLENLDDPEKLKELIELPPFEIVTGERLPANFFKFQFRNVEYSSGRNKTFLCYVVEAQGKGGQVQASRGYLEDEHAAAHAEEAFFNTILPAFDPALRYNVTWYVSSSPCAACADRIIKTLSKTKNLRLLILVGRLFMWEEPEIQAALKKLKEAGCKLRIMKPQDFEYVWQNFVEQEEGESKAFQPWEDIQENFLYYEEKLADILK

SEQ ID NO: 54 - protein, 224 aa, Mus musculus
  MISC_FEATURE (1)..(224): Mouse APOBEC-2 polypeptide sequence
MAQKEEAAEAAAPASQNGDDLENLEDPEKLKELIDLPPFEIVTGVRLPVNFFKFQFRNVEYSSGRNKTFLCYVVEVQSKGGQAQATQGYLEDEHAGAHAEEAFFNTILPAFDPALKYNVTWYVSSSPCAACADRILKTLSKTKNLRLLILVSRLFMWEEPEVQAALKKLKEAGCKLRIMKPQDFEYIWQNFVEQEEGESKAFEPWEDIQENFLYYEEKLADILK

SEQ ID NO: 55 - protein, 224 aa, Rattus
  MISC_FEATURE (1)..(224): Rat APOBEC-2 polypeptide sequence
MAQKEEAAEAAAPASQNGDDLENLEDPEKLKELIDLPPFEIVTGVRLPVNFFKFQFRNVEYSSGRNKTFLCYVVEAQSKGGQVQATQGYLEDEHAGAHAEEAFFNTILPAFDPALKYNVTWYVSSSPCAACADRILKTLSKTKNLRLLILVSRLFMWEEPEVQAALKKLKEAGCKLRIMKPQDFEYLWQNFVEQEEGESKAFEPWEDIQENFLYYEEKLADILK

SEQ ID NO: 56 - protein, 208 aa, Petromyzon marinus
  MISC_FEATURE (1)..(208): Petromyzon marinus CDA1 (pmCDAl) polypeptide sequence
MTDAEYVRIHEKLDIYTFKKQFFNNKKSVSHRCYVLFELKRRGERRACFWGYAVNKPQSGTERGIHAEIFSIRKVEEYLRDNPGQFTINWYSSWSPCADCAEKILEWYNQELRGNGHTLKIWACKLYYEKNARNQIGLWNLRDNGVGLNVMVSEHYQCCRKIFIQSSHNQLNENRWLEKTLKRAEKRRSELSFMIQVKILHTTKSPAV

SEQ ID NO: 57 - protein, 381 aa, Homo sapiens
  MISC_FEATURE (1)..(381): Human APOBEC3G D316R D317R polypeptide sequence
MKPHFRNTVERMYRDTFSYNFYNRPILSRRNTVWLCYEVKTKGPSRPPLDAKIFRGQVYSELKYHPEMRFFHWFSKWRKLHRDQEYEVTWYISWSPCTKCTRDMATFLAEDPKVTLTIFVARLYYFWDPDYQEALRSLCQKRDGPRATMKFNYDEFQHCWSKFVYSQRELFEPWNNLPKYYILLHFMLGEILRHSMDPPTFTFNFNNEPWVRGRHETYLCYEVERMHNDTWVLLNQRRGFLCNQAPHKHGFLEGRHAELCFLDVIPFWKLDLDQDYRVTCFTSWSPCFSCAQEMAKFISKKHVSLCIFTARIYRRQGRCQEGLRTLAEAGAKISFTYSEFKHCWDTFVDHQGCPFQPWDGLDEHSQDLSGRLRAILQNQEN

SEQ ID NO: 58 - protein, 182 aa, Homo sapiens
  MISC_FEATURE (1)..(182): Human APOBEC3G chain A polypeptide sequence
MDPPTFTFNFNNEPWWGRHETYLCYEVERMHNDTWVLLNQRRGFLCNQAPHKHGFLEGRHAELCFLDVIPFWKLDLDQDYRVTCFTSWSPCFSCAQEMAKFISKNKHVSLCIFTARIYDDQGRCQEGLRTLAEAGAKISFTYSEFKHCWDTFVDHQGCPFQPWDGLDEHSQDLSGRLRAILQ

SEQ ID NO: 59 - protein, 184 aa, Homo sapiens
  MISC_FEATURE (1)..(184): Human APOBEC3G chain A D120R D121R polypeptide sequence
MDPPTFTFNFNNEPWVRGRHETYLCYEVERMHNDTWVLLNQRRGFLCNQAPHKHGFLEGRHAELCFLDVIPFWKLDLDQDYRVTCFTSWSPCFSCAQEMAKFISKNKHVSLCIFTARIYRRQGRCQEGLRTLAEAGAKISFMTYSEFKHCWDTFVDHQGCPFQPWDGLDEHSQDLSGRLRAILQ

SEQ ID NO: 60 - protein, 367 aa, Homo sapiens
  MISC_FEATURE (1)..(367): hAPOBEC-4 polypeptide sequence
MEPIYEEYLANHGTIVKPYYWLSFSLDCSNCPYHIRTGEEARVSLTEFCQIFGFPYGTTFPQTKHLTFYELKTSSGSLVQKGHASSCTGNYIHPESMLFEMNGYLDSAIYNNDSIRHIILYSNNSPCNEANHCCISKMYNFLITYPGITLSIYFSQLYHTEMDFPASAWNREALRSLASLWPRVVLSPISGGIWHSVLHSFISGVSGSHVFQPILTGRALADRHNAYEINAITGVKPYFTDVLLQTKRNPNTKAQEALESYPLNNAFPGQFFQMPSGQLQPNLPPDLRAPVVFVLVPLRDLPPMHMGQNPNKPRNIVRHLNMPQMSFQETKDLGRLPTGRSVEIVEITEQFASSKEADEKKKKKGKK

SEQ ID NO: 61 - protein, 388 aa, Rattus norvegicus
  MISC_FEATURE (1)..(388): rAPOBEC-4 polypeptide sequence
MEPLYEEYLTHSGTIVKPYYWLSVSLNCTNCPYHIRTGEEARVPYTEFHQTFGFPWSTYPQTKHLTFYELRSSSGNLIQKGLASNCTGSHTHPESMLFERDGYLDSLIFHDSNIRHIILYSNNSPCDEANHCCISKMYNFLMNYPEVTLSVFFSQLYHTENQFPTSAWNREALRGLASLWPQVTLSAISGGIWQSILETFVSGISEGLTAVRPFTAGRTLTDRYNAYEINCITEVKPYFTDALHSWQKENQDQKVWAASENQPLHNTTPAQWQPDMSQDCRTPAVFMLVPYRDLPPIHVNPSPQKPRTVVRHLNTLQLSASKVKALRKSPSGRPVKKEEARKGSTRSQEANETNKSKWKKQTLFIKSNICHLLEREQKKIGILSSWSV

SEQ ID NO: 62 - protein, 363 aa, Macaca fascicularis
  MISC_FEATURE (1)..(363): mfAPOBEC-4 polypeptide sequence
MEPTYEEYLANHGTIVKPYYWLSFSLDCSNCPYHIRTGEEARVSLTEFCQIFGFPYGTTYPQTKHLTFYELKTSSGSLVQKGHASSCTGNYIHPESMLFEMNGYLDSAIYNNDSIRHIILYCNNSPCNEANHCCISKVYNFLITYPGITLSIYFSQLYHTEMDFPASAWNREALRSLASLWPRVVLSPISGGIWHSVLHSFVSGVSGSHVFQPILTGRALTDRYNAYEINAITGVKPFFTDVLLHTKRNPNTKAQMALESYPLNNAFPGQSFQMTSGIPPDLRAPVVFVLLPLRDLPPMHMGQDPNKPRNIIRHLNMPQMSFQETKDLERLPTRRSVETVEITERFASSKQAEEKTKKKKGKK

SEQ ID NO: 63 - protein, 218 aa, Rattus norvegicus
  MISC_FEATURE (1)..(218): rAPOBEC-1 (delta 177-186) polypeptide sequence
MSSETGPVAVDPTLRRRIEPHEFEVFFDPRELRKETCLLYEINWGGRHSIWRHTSQNTNKHVEVNFIEKFTTERYFCPNTRCSITWFLSWSPCGECSRAITEFLSRYPHVTLFIYIARLYHHADPRNRQGLRDLISSGVTIQIMTEQESGYCWRNFVNYSPSNEAHWPRYPHLWVRGLPPCLNILRRKQPQLTFFTIALQSCHYQRLPPHILWATGLK

SEQ ID NO: 64 - protein, 218 aa, Rattus norvegicus
  MISC_FEATURE (1)..(218): rAPOBEC-1 (delta 202-213) polypeptide sequence
MSSETGPVAVDPTLRRRIEPHEFEVFFDPRELRKETCLLYEINWGGRHSIWRHTSQNTNKHVEVNFIEKFTTERYFCPNTRCSITWFLSWSPCGECSRAITEFLSRYPHVTLFIYIARLYHHADPRNRQGLRDLISSGVTIQIMTEQESGYCWRNFVNYSPSNEAHWPRYPHLWVRLYVLELYCIILGLPPCLNILRRKQPQHYQRLPPHILWATGLK

SEQ ID NO: 65 - protein, 224 aa, Petromyzon marinus
  MISC_FEATURE (1)..(224): pmCDA-1 polypeptide sequence
MAGYECVRVSEKLDFDTFEFQFENLHYATERHRTYVIFDVKPQSAGGRSRRLWGYIINNPNVCHAELILMSMIDRHLESNPGVYAMTWYMSWSPCANCSSKLNPWLKNLLEEQGHTLTMHFSRIYDRDREGDHRGLRGLKHVSNSFRMGVVGRAEVKECLAEYVEASRRTLTWLDTTESMAAKMRRKLFCILVRCAGMRESGIPLHLFTLQTPLLSGRVVWWRV

SEQ ID NO: 66 - protein, 331 aa, Petromyzon marinus
  MISC_FEATURE (1)..(331): pmCDA-2 polypeptide sequence
MELREVVDCALASCVRHEPLSRVAFLRCFAAPSQKPRGTVILFYVEGAGRGVTGGHAVNYNKQGTSIHAEVLLLSAVRAALLRRRRCEDGEEATRGCTLHCYSTYSPCRDCVEYIQEFGASTGVRVVIHCCRLYELDVNRRRSEAEGVLRSLSRLGRDFRLMGPRDAIALLLGGRLANTADGESGASGNAWVTETNVVEPLVDMTGFGDEDLHAQVQRNKQIREAYANYASAVSLMLGELHVDPDKFPFLAEFLAQTSVEPSGTPRETRGRPRGASSRGPEIGRQRPADFERALGAYGLFLHPRIVSREADREEIKRDLIVVMRKHNYQGP

SEQ ID NO: 67 - protein, 209 aa, Petromyzon marinus
  MISC_FEATURE (1)..(209): pmCDA-5  polypeptide sequence
MAGDENVRVSEKLDFDTFEFQFENLHYATERHRTYVIFDVKPQSAGGRSRRLWGYIINNPNVCHAELILMSMIDRHLESNPGVYAMTWYMSWSPCANCSSKLNPWLKNLLEEQGHTLMMHFSRIYDRDREGDHRGLRGLKHVSNSFRMGVVGRAEVKECLAEYVEASRRTLTWLDTTESMAAKMRRKLFCILVRCAGMRESGMPLHLFT

SEQ ID NO: 68 - protein, 158 aa, Saccharomyces cerevisiae
  MISC_FEATURE (1)..(158): yCD polypeptide sequence
MVTGGMASKWDQKGMDIAYEEAALGYKEGGVPIGGCLINNKDGSVLGRGHNMRFQKGSATLHGEISTLENCGRLEGKVYKDTTLYTTLSPCDMCTGAIIMYGIPRCVVGENVNFKSKGEKYLQTRGHEVVVVDDERCKKIMKQFIDERPQDWFEDIGE

SEQ ID NO: 69 - protein, 976 aa, Homo sapiens [sequence omitted]

SEQ ID NO: 70 - DNA, 5190 bp, Homo sapiens
  misc_feature (1)..(5190): NM_000222.2 Homo sapiens KIT proto-oncogene, receptor tyrosine kinase (KIT), transcript variant 1, mRNA polynucleotide sequence
tctgggggctcggctttgccgcgctcgctgcacttgggcgagagctggaacgtggaccagagctcggatcccatcgcagctaccgcgatgagaggcgctcgcggcgcctgggattttctctgcgttctgctcctactgcttcgcgtccagacaggctcttctcaaccatctgtgagtccaggggaaccgtctccaccatccatccatccaggaaaatcagacttaatagtccgcgtgggcgacgagattaggctgttatgcactgatccgggctttgtcaaatggacttttgagatcctggatgaaacgaatgagaataagcagaatgaatggatcacggaaaaggcagaagccaccaacaccggcaaatacacgtgcaccaacaaacacggcttaagcaattccatttatgtgtttgttagagatcctgccaagcttttccttgttgaccgctccttgtatgggaaagaagacaacgacacgctggtccgctgtcctctcacagacccagaagtgaccaattattccctcaaggggtgccaggggaagcctcttcccaaggacttgaggtttattcctgaccccaaggcgggcatcatgatcaaaagtgtgaaacgcgcctaccatcggctctgtctgcattgttctgtggaccaggagggcaagtcagtgctgtcggaaaaattcatcctgaaagtgaggccagccttcaaagctgtgcctgttgtgtctgtgtccaaagcaagctatcttcttagggaaggggaagaattcacagtgacgtgcacaataaaagatgtgtctagttctgtgtactcaacgtggaaaagagaaaacagtcagactaaactacaggagaaatataatagctggcatcacggtgacttcaattatgaacgtcaggcaacgttgactatcagttcagcgagagttaatgattctggagtgttcatgtgttatgccaataatacttttggatcagcaaatgtcacaacaaccttggaagtagtagataaaggattcattaatatcttccccatgataaacactacagtatttgtaaacgatggagaaaatgtagatttgattgttgaatatgaagcattccccaaacctgaacaccagcagtggatctatatgaacagaaccttcactgataaatgggaagattatcccaagtctgagaatgaaagtaatatcagatacgtaagtgaacttcatctaacgagattaaaaggcaccgaaggaggcacttacacattcctagtgtccaattctgacgtcaatgctgccatagcatttaatgtttatgtgaatacaaaaccagaaatcctgacttacgacaggctcgtgaatggcatgctccaatgtgtggcagcaggattcccagagcccacaatagattggtatttttgtccaggaactgagcagagatgctctgcttctgtactgccagtggatgtgcagacactaaactcatctgggccaccgtttggaaagctagtggttcagagttctatagattctagtgcattcaagcacaatggcacggttgaatgtaaggcttacaacgatgtgggcaagacttctgcctattttaactttgcatttaaaggtaacaacaaagagcaaatccatccccacaccctgttcactcctttgctgattggtttcgtaatcgtagctggcatgatgtgcattattgtgatgattctgacctacaaatatttacagaaacccatgtatgaagtacagtggaaggttgttgaggagataaatggaaacaattatgtttacatagacccaacacaacttccttatgatcacaaatgggagtttcccagaaacaggctgagttttgggaaaaccctgggtgctggagctttcgggaaggttgttgaggcaactgcttatggcttaattaagtcagatgcggccatgactgtcgctgtaaagatgctcaagccgagtgcccatttgacagaacgggaagccctcatgtctgaactcaaagtcctgagttaccttggtaatcacatgaatattgtgaatctacttggagcctgcaccattggagggcccaccctggtcattacagaatattgttgctatggtgatcttttgaattttttgagaagaaaacgtgattcatttatttgttcaaagcaggaagatcatgcagaagctgcactttataagaatcttctgcattcaaaggagtcttcctgcagcgatagtactaatgagtacatggacatgaaacctggagtttcttatgttgtcccaaccaaggccgacaaaaggagatctgtgagaataggctcatacatagaaagagatgtgactcccgccatcatggaggatgacgagttggccctagacttagaagacttgctgagcttttcttaccaggtggcaaagggcatggctttcctcgcctccaagaattgtattcacagagacttggcagccagaaatatcctccttactcatggtcggatcacaaagatttgtgattttggtctagccagagacatcaagaatgattctaattatgtggttaaaggaaacgctcgactacctgtgaagtggatggcacctgaaagcattttcaactgtgtatacacgtttgaaagtgacgtctggtcctatgggatttttctttgggagctgttctctttaggaagcagcccctatcctggaatgccggtcgattctaagttctacaagatgatcaaggaaggcttccggatgctcagccctgaacacgcacctgctgaaatgtatgacataatgaagacttgctgggatgcagatcccctaaaaagaccaacattcaagcaaattgttcagctaattgagaagcagatttcagagagcaccaatcatatttactccaacttagcaaactgcagccccaaccgacagaagcccgtggtagaccattctgtgcggatcaattctgtcggcagcaccgcttcctcctcccagcctctgcttgtgcacgacgatgtctgagcagaatcagtgtttgggtcacccctccaggaatgatctcttcttttggcttccatgatggttattttcttttctttcaacttgcatccaactccaggatagtgggcaccccactgcaatcctgtctttctgagcacactttagtggccgatgatttttgtcatcagccaccatcctattgcaaaggttccaactgtatatattcccaatagcaacgtagcttctaccatgaacagaaaacattctgatttggaaaaagagagggaggtatggactgggggccagagtcctttccaaggcttctccaattctgcccaaaaatatggttgatagtttacctgaataaatggtagtaatcacagttggccttcagaaccatccatagtagtatgatgatacaagattagaagctgaaaacctaagtcctttatgtggaaaacagaacatcattagaacaaaggacagagtatgaacacctgggcttaagaaatctagtatttcatgctgggaatgagacataggccatgaaaaaaatgatccccaagtgtgaacaaaagatgctcttctgtggaccactgcatgagcttttatactaccgacctggtttttaaatagagtttgctattagagcattgaattggagagaaggcctccctagccagcacttgtatatacgcatctataaattgtccgtgttcatacatttgaggggaaaacaccataaggtttcgtttctgtatacaaccctggcattatgtccactgtgtatagaagtagattaagagccatataagtttgaaggaaacagttaataccattttttaaggaaacaatataaccacaaagcacagtttgaacaaaatctcctcttttagctgatgaacttattctgtagattctgtggaacaagcctatcagcttcagaatggcattgtactcaatggatttgatgctgtttgacaaagttactgattcactgcatggctcccacaggagtgggaaaacactgccatcttagtttggattcttatgtagcaggaaataaagtataggtttagcctccttcgcaggcatgtcctggacaccgggccagtatctatatatgtgtatgtacgtttgtatgtgtgtagacaaatatttggaggggtatttttgccctgagtccaagagggtcctttagtacctgaaaagtaacttggctttcattattagtactgctcttgtttcttttcacatagctgtctagagtagcttaccagaagcttccatagtggtgcagaggaagtggaaggcatcagtccctatgtatttgcagttcacctgcacttaaggcactctgttatttagactcatcttactgtacctgttccttagaccttccataatgctactgtctcactgaaacatttaaattttaccctttagactgtagcctggatattattcttgtagtttacctctttaaaaacaaaacaaaacaaaacaaaaaactccccttcctcactgcccaatataaaaggcaaatgtgtacatggcagagtttgtgtgttgtcttgaaagattcaggtatgttgcctttatggtttcccccttctacatttcttagactacatttagagaactgtggccgttatctggaagtaaccatttgcactggagttctatgctctcgcacctttccaaagttaacagattttggggttgtgttgtcacccaagagattgttgtttgccatactttgtctgaaaaattcctttgtgtttctattgacttcaatgatagtaagaaaagtggttgttagttatagatgtctaggtacttcaggggcacttcattgagagttttgtcttggatattcttgaaagtttatatttttataattttttcttacatcagatgtttctttgcagtggcttaatgtttgaaattattttgtggctttttttgtaaatattgaaatgtagcaataatgtcttttgaatattcccaagcccatgagtccttgaaaatattttttatatatacagtaactttatgtgtaaatacataagcggcgtaagtttaaaggatgttggtgttccacgtgttttattcctgtatgttgtccaattgttgacagttctgaagaattctaataaaatgtacatatataaatcaaaaaaaaaaaaaaaa

SEQ ID NO: 71 - protein, 356 aa, Homo sapiens
  MISC_FEATURE (1)..(356): NP_001008540.1 C-X-C chemokine receptor type 4 isoform a [Homo sapiens] polypeptide sequence
MSIPLPLLQIYTSDNYTEEMGSGDYDSMKEPCFREENANFNKIFLPTIYSIIFLTGIVGNGLVILVMGYQKKLRSMTDKYRLHLSVADLLFVITLPFWAVDAVANWYFGNFLCKAVHVIYTVNLYSSVLILAFISLDRYLAIVHATNSQRPRKLLAEKVVYVGVWIPALLLTIPDFIFANVSEADDRYICDRFYPNDLWVVVFQFQHIMVGLILPGIVILSCYCIIISKLSHSKGHQKRKALKTTVILILAFFACWLPYYIGISIDSFILLEIIKQGCEFENTVHKWISITEALAFFHCCLNPILYAFLGAKFKTSAQHALTSVSRGSSLKILSKGKRGGHSSVSTESESSSFHSS

SEQ ID NO: 72 - DNA, 1691 bp, Homo sapiens
  misc_feature (1)..(1691): NM_003467.2 Homo sapiens C-X-C motif chemokine receptor 4 (CXCR4), transcript variant 2, mRNA polynucleotide sequence
aacttcagtttgttggctgcggcagcaggtagcaaagtgacgccgagggcctgagtgctccagtagccaccgcatctggagaaccagcggttaccatggaggggatcagtatatacacttcagataactacaccgaggaaatgggctcaggggactatgactccatgaaggaaccctgtttccgtgaagaaaatgctaatttcaataaaatcttcctgcccaccatctactccatcatcttcttaactggcattgtgggcaatggattggtcatcctggtcatgggttaccagaagaaactgagaagcatgacggacaagtacaggctgcacctgtcagtggccgacctcctctttgtcatcacgcttcccttctgggcagttgatgccgtggcaaactggtactttgggaacttcctatgcaaggcagtccatgtcatctacacagtcaacctctacagcagtgtcctcatcctggccttcatcagtctggaccgctacctggccatcgtccacgccaccaacagtcagaggccaaggaagctgttggctgaaaaggtggtctatgttggcgtctggatccctgccctcctgctgactattcccgacttcatctttgccaacgtcagtgaggcagatgacagatatatctgtgaccgcttctaccccaatgacttgtgggtggttgtgttccagtttcagcacatcatggttggccttatcctgcctggtattgtcatcctgtcctgctattgcattatcatctccaagctgtcacactccaagggccaccagaagcgcaaggccctcaagaccacagtcatcctcatcctggctttcttcgcctgttggctgccttactacattgggatcagcatcgactccttcatcctcctggaaatcatcaagcaagggtgtgagtttgagaacactgtgcacaagtggatttccatcaccgaggccctagctttcttccactgttgtctgaaccccatcctctatgctttccttggagccaaatttaaaacctctgcccagcacgcactcacctctgtgagcagagggtccagcctcaagatcctctccaaaggaaagcgaggtggacattcatctgtttccactgagtctgagtcttcaagttttcactccagctaacacagatgtaaaagacttttttttatacgataaataacttttttttaagttacacatttttcagatataaaagactgaccaatattgtacagtttttattgcttgttggatttttgtcttgtgtttctttagtttttgtgaagtttaattgacttatttatataaattttttttgtttcatattgatgtgtgtctaggcaggacctgtggccaagttcttagttgctgtatgtctcgtggtaggactgtagaaaagggaactgaacattccagagcgtgtagtgaatcacgtaaagctagaaatgatccccagctgtttatgcatagataatctctccattcccgtggaacgtttttcctgttcttaagacgtgattttgctgtagaagatggcacttataaccaaagcccaaagtggtatagaaatgctggtttttcagttttcaggagtgggttgatttcagcacctacagtgtacagtcttgtattaagttgttaataaaagtacatgttaaacttaaaaaaaaaaaaaaaaaa

SEQ ID NO: 73 - protein, 993 aa, Homo sapiens
  MISC_FEATURE (1)..(993): NP_004110.2 receptor-type tyrosine-protein kinase FLT3 precursor [Homo sapiens] polypeptide sequence
MPALARDGGQLPLLVVFSAMIFGTITNQDLPVIKCVLINHKNNDSSVGKSSSYPMVSESPEDLGCALRPQSSGTVYEAAAVEVDVSASITLQVLVDAPGNISCLWVFKHSSLNCQPHFDLQNRGVVSMVILKMTETQAGEYLLFIQSEATNYTILFTVSIRNTLLYTLRRPYFRKMENQDALVCISESVPEPIVEWVLCDSQGESCKEESPAVVKKEEKVLHELFGTDIRCCARNELGRECTRLFTIDLNQTPQTTLPQLFLKVGEPLWIRCKAVHVNHGFGLTWELENKALEEGNYFEMSTYSTNRTMIRILFAFVSSVARNDTGYYTCSSSKHPSQSALVTIVEKGFINATNSSEDYEIDQYEEFCFSVRFKAYPQIRCTWTFSRKSFPCEQKGLDNGYSISKFCNHKHQPGEYIFHAENDDAQFTKMFTLNIRRKPQVLAEASASQASCFSDGYPLPSWTWKKCSDKSPNCTEEITEGVWNRKANRKVFGQWVSSSTLNMSEAIKGFLVKCCAYNSLGTSCETILLNSPGPFPFIQDNISFYATIGVCLLFIVVLTLLICHKYKKQFRYESQLQMVQVTGSSDNEYFYVDFREYEYDLKWEFPRENLEFGKVLGSGAFGKVMNATAYGISKTGVSIQVAVKMLKEKADSSEREALMSELKMMTQLGSHENIVNLLGACTLSGPIYLIFEYCCYGDLLNYLRSKREKFHRTWTEIFKEHNFSFYPTFQSHPNSSMPGSREVQIHPDSDQISGLHGNSFHSEDEIEYENQKRLEEEEDLNVLTFEDLLCFAYQVAKGMEFLEFKSCVHRDLAARNVLVTHGKVVKICDFGLARDIMSDSNYVVRGNARLPVKWMAPESLFEGIYTIKSDVWSYGILLWEIFSLGVNPYPGIPVDANFYKLIQNGFKMDQPFYATEEIYIIMQSCWAFDSRKRPSFPNLTSFLGCQLADAEEAMYQNVDGRVSECPHTYQNRRPFSREMDLGLLSPQAQVEDS

SEQ ID NO: 74 - DNA, 3848 bp, Homo sapiens
  misc_feature (1)..(3848): NM_004119.2 Homo sapiens fms related tyrosine kinase 3 (FLT3), transcript variant 1, mRNA polynucleotide sequence
acctgcagcgcgaggcgcgccgctccaggcggcatcgcagggctgggccggcgcggcctggggaccccgggctccggaggccatgccggcgttggcgcgcgacggcggccagctgccgctgctcgttgttttttctgcaatgatatttgggactattacaaatcaagatctgcctgtgatcaagtgtgttttaatcaatcataagaacaatgattcatcagtggggaagtcatcatcatatcccatggtatcagaatccccggaagacctcgggtgtgcgttgagaccccagagctcagggacagtgtacgaagctgccgctgtggaagtggatgtatctgcttccatcacactgcaagtgctggtcgacgccccagggaacatttcctgtctctgggtctttaagcacagctccctgaattgccagccacattttgatttacaaaacagaggagttgtttccatggtcattttgaaaatgacagaaacccaagctggagaatacctactttttattcagagtgaagctaccaattacacaatattgtttacagtgagtataagaaataccctgctttacacattaagaagaccttactttagaaaaatggaaaaccaggacgccctggtctgcatatctgagagcgttccagagccgatcgtggaatgggtgctttgcgattcacagggggaaagctgtaaagaagaaagtccagctgttgttaaaaaggaggaaaaagtgcttcatgaattatttgggacggacataaggtgctgtgccagaaatgaactgggcagggaatgcaccaggctgttcacaatagatctaaatcaaactcctcagaccacattgccacaattatttcttaaagtaggggaacccttatggataaggtgcaaagctgttcatgtgaaccatggattcgggctcacctgggaattagaaaacaaagcactcgaggagggcaactactttgagatgagtacctattcaacaaacagaactatgatacggattctgtttgcttttgtatcatcagtggcaagaaacgacaccggatactacacttgttcctcttcaaagcatcccagtcaatcagctttggttaccatcgtagaaaagggatttataaatgctaccaattcaagtgaagattatgaaattgaccaatatgaagagttttgtttttctgtcaggtttaaagcctacccacaaatcagatgtacgtggaccttctctcgaaaatcatttccttgtgagcaaaagggtcttgataacggatacagcatatccaagttttgcaatcataagcaccagccaggagaatatatattccatgcagaaaatgatgatgcccaatttaccaaaatgttcacgctgaatataagaaggaaacctcaagtgctcgcagaagcatcggcaagtcaggcgtcctgtttctcggatggatacccattaccatcttggacctggaagaagtgttcagacaagtctcccaactgcacagaagagatcacagaaggagtctggaatagaaaggctaacagaaaagtgtttggacagtgggtgtcgagcagtactctaaacatgagtgaagccataaaagggttcctggtcaagtgctgtgcatacaattcccttggcacatcttgtgagacgatccttttaaactctccaggccccttccctttcatccaagacaacatctcattctatgcaacaattggtgtttgtctcctcttcattgtcgttttaaccctgctaatttgtcacaagtacaaaaagcaatttaggtatgaaagccagctacagatggtacaggtgaccggctcctcagataatgagtacttctacgttgatttcagagaatatgaatatgatctcaaatgggagtttccaagagaaaatttagagtttgggaaggtactaggatcaggtgcttttggaaaagtgatgaacgcaacagcttatggaattagcaaaacaggagtctcaatccaggttgccgtcaaaatgctgaaagaaaaagcagacagctctgaaagagaggcactcatgtcagaactcaagatgatgacccagctgggaagccacgagaatattgtgaacctgctgggggcgtgcacactgtcaggaccaatttacttgatttttgaatactgttgctatggtgatcttctcaactatctaagaagtaaaagagaaaaatttcacaggacttggacagagattttcaaggaacacaatttcagtttttaccccactttccaatcacatccaaattccagcatgcctggttcaagagaagttcagatacacccggactcggatcaaatctcagggcttcatgggaattcatttcactctgaagatgaaattgaatatgaaaaccaaaaaaggctggaagaagaggaggacttgaatgtgcttacatttgaagatcttctttgctttgcatatcaagttgccaaaggaatggaatttctggaatttaagtcgtgtgttcacagagacctggccgccaggaacgtgcttgtcacccacgggaaagtggtgaagatatgtgactttggattggctcgagatatcatgagtgattccaactatgttgtcaggggcaatgcccgtctgcctgtaaaatggatggcccccgaaagcctgtttgaaggcatctacaccattaagagtgatgtctggtcatatggaatattactgtgggaaatcttctcacttggtgtgaatccttaccctggcattccggttgatgctaacttctacaaactgattcaaaatggatttaaaatggatcagccattttatgctacagaagaaatatacattataatgcaatcctgctgggcttttgactcaaggaaacggccatccttccctaatttgacttcgtttttaggatgtcagctggcagatgcagaagaagcgatgtatcagaatgtggatggccgtgtttcggaatgtcctcacacctaccaaaacaggcgacctttcagcagagagatggatttggggctactctctccgcaggctcaggtcgaagattcgtagaggaacaatttagttttaaggacttcatccctccacctatccctaacaggctgtagattaccaaaacaagattaatttcatcactaaaagaaaatctattatcaactgctgcttcaccagacttttctctagaagctgtctgcgtttactcttgttttcaaagggacttttgtaaaatcaaatcatcctgtcacaaggcaggaggagctgataatgaactttattggagcattgatctgcatccaaggccttctcaggctggcttgagtgaattgtgtacctgaagtacagtatattcttgtaaatacataaaacaaaagcattttgctaaggagaagctaatatgattttttaagtctatgttttaaaataatatgtaaatttttcagctatttagtgatatattttatgggtgggaataaaatttctactacagaattgcccattattgaattatttacatggtataattagggcaagtcttaactggagttcacgaaccccctgaaattgtgcacccatagccacctacacattccttccagagcacgtgtgcttttaccccaagatacaaggaatgtgtaggcagctatggttgtcacagcctaagatttctgcaacaacaggggttgtattgggggaagtttataatgaataggtgttctaccataaagagtaatacatcacctagacactttggcggccttcccagactcagggccagtcagaagtaacatggaggattagtattttcaataaagttactcttgtccccacaaaaaaa

SEQ ID NO: 75 - protein, 161 aa, Homo sapiens
  MISC_FEATURE (1)..(161): NP_001298089.1 thy-1 membrane glycoprotein isoform 1 preproprotein [Homo sapiens] polypeptide sequence
MNLAISIALLLTVLQVSRGQKVTSLTACLVDQSLRLDCRHENTSSSPIQYEFSLTRETKKHVLFGTVGVPEHTYRSRTNFTSKYNMKVLYLSAFTSKDEGTYTCALHHSGHSPPISSQNVTVLRDKLVKCEGISLLAQNTSWLLLLLLSLSLLQATDFMSL

SEQ ID NO: 76 - DNA, 4502 bp, Homo sapiens
  misc_feature (1)..(4502): NM_006288.5 Homo sapiens Thy-1 cell surface antigen (THY1), transcript variant 1, mRNA polynucleotide sequence
agcaaccggaggcggcggcgcgtctggaggaggctgcagcagcggaagaccccagtccagatccaggactgagatcccagaaccatgaacctggccatcagcatcgctctcctgctaacagtcttgcaggtctcccgagggcagaaggtgaccagcctaacggcctgcctagtggaccagagccttcgtctggactgccgccatgagaataccagcagttcacccatccagtacgagttcagcctgacccgtgagacaaagaagcacgtgctctttggcactgtgggggtgcctgagcacacataccgctcccgaaccaacttcaccagcaaatacaacatgaaggtcctctacttatccgccttcactagcaaggacgagggcacctacacgtgtgcactccaccactctggccattccccacccatctcctcccagaacgtcacagtgctcagagacaaactggtcaagtgtgagggcatcagcctgctggctcagaacacctcgtggctgctgctgctcctgctctccctctccctcctccaggccacggatttcatgtccctgtgactggtggggcccatggaggagacaggaagcctcaagttccagtgcagagatcctacttctctgagtcagctgaccccctccccccaatccctcaaaccttgaggagaagtggggaccccacccctcatcaggagttccagtgctgcatgcgattatctacccacgtccacgcggccacctcaccctctccgcacacctctggctgtctttttgtactttttgttccagagctgcttctgtctggtttatttaggttttatccttccttttctttgagagttcgtgaagagggaagccaggattggggacctgatggagagtgagagcatgtgaggggtagtgggatggtggggtaccagccactggaggggtcatccttgcccatcgggaccagaaacctgggagagacttggatgaggagtggttgggctgtgcctgggcctagcacggacatggtctgtcctgacagcactcctcggcaggcatggctggtgcctgaagaccccagatgtgagggcaccaccaagaatttgtggcctaccttgtgagggagagaactgagcatctccagcattctcagccacaaccaaaaaaaaataaaaagggcagccctccttaccactgtggaagtccctcagaggccttggggcatgacccagtgaagatgcaggtttgaccaggaaagcagcgctagtggagggttggagaaggaggtaaaggatgagggttcatcatccctccctgcctaaggaagctaaaagcatggccctgctgcccctccctgcctccacccacagtggagagggctacaaaggaggacaagaccctctcaggctgtcccaagctcccaagagcttccagagctctgacccacagcctccaagtcaggtggggtggagtcccagagctgcacagggtttggcccaagtttctaagggaggcacttcctcccctcgcccatcagtgccagcccctgctggctggtgcctgagcccctcagacagccccctgccccgcaggcctgccttctcagggacttctgcggggcctgaggcaagccatggagtgagacccaggagccggacacttctcaggaaatggcttttcccaacccccagcccccacccggtggttcttcctgttctgtgactgtgtatagtgccaccacagcttatggcatctcattgaggacaaagaaaactgcacaataaaaccaagcctctggaatctgtcctcgtgtccacctggccttcgctcctccagcagtgcctgcctgcccccgcttcgctggggtctccacgggtgaggctggggaacgccacctcttcctcttccctgacttctccccaaccacttagtagcaacgctaccccaggggctaatgactgcacactgggcttcttttcagaatgaccctaacgagacacatttgcccaaataaacgaacatcccatgtctgctgactcacctggctggaacaacatgcttactgccaacatgtgggccgaaccacatggccctggctctggaatgcacaagtggctttgcgtgaatctgcgctaagctatgcagtctgctttttcttctcagctctggtagttcttcagaaatgtaccctccaggcacatccactattgcgagggtgagcacgaagggtgggagatgcccatgtcctcaaggcatcacttcctaaatccaaaagcatcggcaggagaaaggactggggacaaatactgtcccttcgggagtagggagggaacactgaggcccatccctggctccttccctaaaagtagagtaaaatggaagcgagcatcctgggattgggggcaagagggggaccgcagggtagctgtgggttccaactgctgtcagagtcagagaggcagccccaagccagcctccctgctttgccagggaatttgggggaggaaggtgacagctgcccagaggctgactcatctgatatttagcactgggtaggatgattgtttctgagcatttttcttaaaggcctcagatctaaattatgccaccggctcccactcttgctacctcccgtcaacttctctgccttgccttccacccctgtagttaccatacacagaggaggaggagctgtccttgtcccaggttgggaggctgacaaccccttagcaagatgctgccagcccagagctctccaaggggaggaacacccctgagactcaggcccctctccttcagccctgcttgggctgcaagcgccgtgccaaggaaaggcatcttggtgagaagagctgctgtgggggaagggagatcaaatgccagagaaatgtggggtgccccaccctcaggatagtaaaagagtatggaggtatttctggaaggaaatgagcggcactgtgtgaagcctcgcacctgtgtgacacttcctatggggtctttgtcacactctagtactatgtccctgaagagtttagcagccacactcttagaagggtgctgggagatggtgttgccctctgcagccatgtttaggggagcggaacctgaggcccacagtgggtgagattagctcaagaagccacagaggccaccagagggccacggacttcggaaaggagaagagaagaacagggcatcaggcctcacaacgcaaacctacccagagatgggcacagtggctcatgcctgtaatcccaccactttgggaagaggcggatcgcttgaggtcaggagttcgagactagcctcgaaaccctatctctactaaaaatacaaaaattagccaggcatggtggcctgcgcctgtaatcccagctactcaggaggctgaggcaggagaatcacttgaacccgggaggcggaggttgcagtgagccaagattgcaccactgcactccagcctgggagatagagtgagactccatctcaaaaaaataaaaaataaaataaacctacccggaatgaccatgctgaggactgggagcccgcagactttcagccacaggccgcgacagccgtgggtccctccctggtcaagtcagcaggccttgtggaggctgtggggtatctgtggtgactcaggtaattatagagggctggcccccagccctggttcctgtacacatgccccaaccccatccccatccactccctcgccagtcctaacctctttcctgggtccccccccttcagcacctaagtccatacctagggccgtggaattcccgctcaagagcaacagaagcccctctctgcacccccatttctggactggattgtccactgagacgcgcaatgtctgcatctctgacatctagaggcttcctcgggaagggcatggggatctccgtgagatgtggggactttcactggccaaccaagaaatctacacagcgtccggggacctgtgacacacatccctcccgcctcctcaacctgatgtccctctctgaatctgcagctttcgtgctgtgaaggtgtctttacatgtgaaacaaacaaacccaagtcaagagtaaatcatctcatttactagtgagaaaatgttggagctggagtccttcagagagtcctggccaggcaagagggccatcagctctcttctgctcaacaggggctctcagcctcaggacactctcaggcctggaatgtccccaacacactcaaggagaaacatgtcctgtgcagacccacaggaggcatctttgcccggcacaaggaagagctggggtcagtgggacctgtagatgtagacacatcatatggagggtgggtaggaccaatgtggcagcttcatggaggccaagtgtggctctgcaccaggaaggggctgtgatggctggaggtgcccagcagtgcaggcggggagtgcctggcagtggcgtggccaggtggaggccacctgtcaagtttgcaataaagcagtttcctgaatttggtgagaa

SEQ ID NO: 77 - protein, 87 aa, Homo sapiens
  MISC_FEATURE (1)..(87): NP_001254727.1 receptor-type tyrosine-protein phosphatase C isoform 5 precursor [Homo sapiens] polypeptide sequence
MTMYLWLKLLAFGFAFLDTEVFVTGQSPTPSPTGHLQAEEQGSQSKSPNLKSREADSSAFSWWPKAREPLTNHWSKSKSPKAEELGV

SEQ ID NO: 78 - DNA, 1395 bp, Homo sapiens
  misc_feature (1)..(1395): NM_001267798.2 Homo sapiens protein tyrosine phosphatase receptor type C (PTPRC), transcript variant 5, mRNA polynucleotide sequence
gacatcatcacctagcagttcatgcagctagcaagtggtttgttcttagggtaacagaggaggaaattgttcctcgtctgataagacaacagtggagaaaggacgcatgctgtttcttagggacacggctgacttccagatatgaccatgtatttgtggcttaaactcttggcatttggctttgcctttctggacacagaagtatttgtgacagggcaaagcccaacaccttcccccactggccatctgcaagctgaggagcaaggaagccaatccaagtcaccaaacctcaaaagtagggaagctgacagttcagccttcagttggtggccaaaggcccgagagcccctcacaaaccactggagtaagtccaagagtccaaaagctgaggaacttggagtctgatgttcaagagcaggaagcagccagcacgagagaaagatgaagaccagaagactcagcaagctcacttctcctaccttcttgtgcctgctttttctagccgtgctggcagttgcttggatgatgcccactcatattgggtgggggtgggggggttggggagggtctgcctcccccagtccactgactcaaatgttaatctcccttggcaatacgctcacaggcacacccaggaacaatactttgcatccttcaatccaatcaagttgacactcaatattaaccatcaaatactattataaggagaatgttgcatgattttccttctagtctgtttgtaattcacatctaatgaaagagtgagagtggacgataaagggaacttgttgaaacatttctctcaaagcaaaagggatcattggaagcaggcagacaccagaattggtttaacctaaaaataacaaattaataattatcaagtctataatgatgacagtgacttaatgtgaatagaaagaattctaaactctctccttccttcctccctcccttctttcctactttctttccactccctttctcccacccccttttcttttcctttcttttctcccaccctctctccctccctttcttttattcaatgcatagtagttgaaaaaatctaaagttagacctgattttacactgaagactagaggtagttactatcctattactgtacttagttggctatgctggcatgtcattatgggtaaaagtttgatggatttatttgtgagttatttggttatgaaaatctagagattgaagtttttcattagaaaataacacacataacaagtctatgatcattttgcatttctgtaatcacagaatagttctgcaatatttcatgtatattggaattgaagttcaattgaattttatctgtatttagtaaaaattaactttagctttgatactaatgaataaagctgggttttttattta

SEQ ID NO: 79 - protein, 385 aa, Homo sapiens
  MISC_FEATURE (1)..(385): NP_001020280.1 hematopoietic progenitor cell antigen CD34 isoform a precursor [Homo sapiens] polypeptide sequence
MLVRRGARAGPRMPRGWTALCLLSLLPSGFMSLDNNGTATPELPTQGTFSNVSTNVSYQETTTPSTLGSTSLHPVSQHGNEATTNITETTVKFTSTSVITSVYGNTNSSVQSQTSVISTVFTTPANVSTPETTLKPSLSPGNVSDLSTTSTSLATSPTKPYTSSSPILSDIKAEIKCSGIREVKLTQGICLEQNKTSSCAEFKKDRGEGLARVLCGEEQADADAGAQVCSLLLAQSEVRPQCLLLVLANRTEISSKLQLMKKHQSDLKKLGILDFTEQDVASHQSYSQKTLIALVTSGALLAVLGITGYFLMNRRSWSPTGERLGEDPYYTENGGGQGYSSGPGTSPEAQGKASVNRGAQENGTGQATSRNGHSARQHVVADTEL

SEQ ID NO: 80 - DNA, 7969 bp, Homo sapiens
  misc_feature (1)..(7969): NM_001025109.2 Homo sapiens CD34 molecule (CD34), transcript variant 1, mRNA polynucleotide sequence
agtgtcttccactcggtgcgtctctctaggagccgcgcgggaaggatgctggtccgcaggggcgcgcgcgcagggcccaggatgccgcggggctggaccgcgctttgcttgctgagtttgctgccttctgggttcatgagtcttgacaacaacggtactgctaccccagagttacctacccagggaacattttcaaatgtttctacaaatgtatcctaccaagaaactacaacacctagtacccttggaagtaccagcctgcaccctgtgtctcaacatggcaatgaggccacaacaaacatcacagaaacgacagtcaaattcacatctacctctgtgataacctcagtttatggaaacacaaactcttctgtccagtcacagacctctgtaatcagcacagtgttcaccaccccagccaacgtttcaactccagagacaaccttgaagcctagcctgtcacctggaaatgtttcagacctttcaaccactagcactagccttgcaacatctcccactaaaccctatacatcatcttctcctatcctaagtgacatcaaggcagaaatcaaatgttcaggcatcagagaagtgaaattgactcagggcatctgcctggagcaaaataagacctccagctgtgcggagtttaagaaggacaggggagagggcctggcccgagtgctgtgtggggaggagcaggctgatgctgatgctggggcccaggtatgctccctgctccttgcccagtctgaggtgaggcctcagtgtctactgctggtcttggccaacagaacagaaatttccagcaaactccaacttatgaaaaagcaccaatctgacctgaaaaagctggggatcctagatttcactgagcaagatgttgcaagccaccagagctattcccaaaagaccctgattgcactggtcacctcgggagccctgctggctgtcttgggcatcactggctatttcctgatgaatcgccgcagctggagccccacaggagaaaggctgggcgaagacccttattacacggaaaacggtggaggccagggctatagctcaggacctgggacctcccctgaggctcagggaaaggccagtgtgaaccgaggggctcaggaaaacgggaccggccaggccacctccagaaacggccattcagcaagacaacacgtggtggctgataccgaattgtgactcggctaggtggggcaaggctgggcagtgtccgagagagcacccctctctgcatctgaccacgtgctacccccatgctggaggtgacatctcttacgcccaacccttccccactgcacacacctcagaggctgttcttggggccctacaccttgaggaggggcaggtaaactcctgtcctttacacattcggctccctggagccagactctggtcttctttgggtaaacgtgtgacgggggaaagccaaggtctggagaagctcccaggaacaatcgatggccttgcagcactcacacaggacccccttcccctaccccctcctctctgccgcaatacaggaacccccaggggaaagatgagcttttctaggctacaattttctcccaggaagctttgatttttaccgtttcttccctgtattttctttctctactttgaggaaaccaaagtaaccttttgcacctgctctcttgtaatgatatagccagaaaaacgtgttgccttgaaccacttccctcatctctcctccaagacactgtggacttggtcaccagctcctcccttgttctctaagttccactgagctccatgtgccccctctaccatttgcagagtcctgcacagttttctggctggagcctagaacaggcctcccaagttttaggacaaacagctcagttctagtctctctggggccacacagaaactctttttgggctcctttttctccctctggatcaaagtaggcaggaccatgggaccaggtcttggagctgagcctctcacctgtactcttccgaaaaatcctcttcctctgaggctggatcctagccttatcctctgatctccatggcttcctcctccctcctgccgactcctgggttgagctgttgcctcagtcccccaacagatgcttttctgtctctgcctccctcaccctgagccccttccttgctctgcacccccatatggtcatagcccagatcagctcctaacccttatcaccagctgcctcttctgtgggtgacccaggtccttgtttgctgttgatttctttccagaggggttgagcagggatcctggtttcaatgacggttggaaatagaaatttccagagaagagagtattgggtagatattttttctgaatacaaagtgatgtgtttaaatactgcaattaaagtgatactgaaacacatctgttatgtgactctgtcttagctgggtgtgtctgcatgcaagagtgacaccctccattagacctagctagactgtgcagtgatgtggtggggaggaccagccagggaagagggagcacctcagcagacacaggcaccagccaggatgctaaggacctttagccaagtctgccaactattctcctccatggggagaggaaacatccatttccagtggtagaaaggcagacccgaatgtaccagggagcttccaaatggagggtggtatgttgggttcttaggagctgtacccttcatgaacacccttctgagaagaggagcatgctgatcactgctgcaaaatatgcaaaacaaagggaaggggcaatgtcctgtgcaccctttattatcaggccacccccctccccagccccccaggtcagagtagacacagtgaaggactatgtggggactgttgttctagagacctggcagccaactcagggagggggctggtttccaccctcaagattaagacagcagcctaattaaaaaaaaaatctgtaagcatgtacctccccccagcttccaaaacaacccccaccccacccctaccaggccataggaagttggggagggagtgctgaggagctccaggaaacactcccaagtgtgtcgacagtggcagaggcagttggggccaaacaaaggttgattcttccattcttatctccataaagccagacctttcccttcagcactcctccacccccatctccttcttgcttttctccaactcctctaatcataggttcttccctaggacagaggggaggcgaaatgatgaggttcagagtcttccctcaaaggcgatggctgccttgagggttggagcaaaggatgatgagcaaaagacgatggtaatcagtagggaagtccagcccacttgcatctagttgcacatcttgccttgagagtaatccagtgagggtctgtcccagctaggacatcaagtaggaggggtgggttcagggttcagattcctaggaaatatgggaggagaggaaaaggcaacttggatgcacctccagcttcaggcctagcaacctgcaatgcatctcaccctgagtttgctggaatgtgtatgtatgctttgggaggaagggctgtgtgtgtattgcggggtggggtggggcagctggttccctctgacagctggacagcttgccctgaagaatttgcctgctttctggaaaaatccaactttcccaccgtgggcctgagcgtcctggtacagcaatggcgccacctgctggccttattgaggtcctactgctcagcctcagctcaatcgcctccatgttgggcttctctccctggctgccccaccctctagtccaatttctcttgtacacaaagctcatataactatagaacgtcactgttgaagagaactttaaagatacatttaattaaactcccttatggtatagttaaagacaaactaaggctcagagaagggaggtggcttgcccaatcacccagaattccaaagtcctgaatctgtagttttcccttccatcatatcatcctactcttctgccgagtcctccgtgttactccagttggatgtcatgaagccagtgtggcagtgtgaagataggtttgggacttcacttctggagcatttcatcaacataagctatcctaggcctggccagccaagcaggtcctggaggagccccaggacaaagatcacaggaggccatgaggttcggcttcttcggcgcccacagtgagcccaggaaaattagctgtagggtattacactgttgactatggagagcatatctggaattatcttcagccagattttcatctgaatggataaatgggaataccatctaagtccagataaatagatcacttccatctcatcccttctaggtagattaatcccacacttcctcttcacacaaaaccagtaataggtcatcgattttgtgcaacaggatgctgcttctcttcctaaagcccccatcgaagaggcttccagccaccattcaatcattcatcaagtcttatgatgtgccagacactgcgcgaaatgtgccagaacatctgttatgtgccagacactgttcttgagactggggatacagcaaacactcatgaagcttataattctagcagaagaggacagtaaacaatgtcatctcagtaagtatatacatgtgttttcaggattgagagctatgaaaaacataaaatatattgagaataatggttggtattttacatatggtggttacttttagaaaaataacagtggagagcacagcttcacttgaatgaagtggagaagcaggttgtatgccaagctgggagagattatcccacacaggggaaaggacaagtgcaaagccctatgatgaaaagctgccaagtgcagaaagcctcagatggcagggggcaagatggccatgaggttgtgtcagtgagtgggggtggggagaggcaggaggtcagactacatggggcctttttagttgtagattgggaagccactggagggttttgagcagagaagtcatatcatctgctttatgttttaaaaggatcatgctggctgctgagtagagaatagaggttgagggataagaaagtagaaggagaccgtagcaagaagaacgatcatggctgggagcaggtgatcatattggcagtgatgagatcaagcagaattcaaaaagtggtttcaaagtagaggtaacaggacttgctcagtctatttatttcttcaaataataatcatatttacaatgatagtagctaacagtttttgagtgcttactgtatgaaaattgagatatggtgccaatatttaaatagcatattttacttaacattcacagaaaccctgtgaagtaggttctattatctcagaaaaagaaactgaaactcagagaataacaagggactgtgttacgtgcacagtggcagaggcaaagatgaataggatgtgagtttatttgaaccccaaatgtttaaatcttggggataatacaacacacatttaaacaaagaagcaagaaaaaaaatgcacaacagaaagtgagaaataacacgaggaaagactaaatgaagtgctttgtatctagatgtgggcaggaccctttccagctgagaagatctgagactgggtcatgaacaggtggtttctgagtgggtcctgtaaaaatgaatacgattttgatgatagtaatgagtaaggacatttgagactgatagaagagtacatacaatatgtagtgatggggaaagataaggtactgtcaaaggacaatgtgttttctggtatgacagagaagtagaatgtgttaagggaagccgagtaccagaaagatccgggtgtcacagtttgtgtagggtgtttaaagctaaaccacagagtttaattttatccaatagaagaggagccacagaagagtttccatttattcattaatttattcatttattcaaaaaatatttgagtgcttattataagccaggtactatgccaggcacctgggataagacatagtcccttctgtcaagtctttacattgggtggatgtgggagggacagatgacagaacaatatgcattgagtgtaagtgctatggtataggaagctctgagtgggaggggcatggaagccgtggaagaccatggaaggcttcccaggagaagtgacgtctggactgatcctttggtcaagcaggagttaaagaggagaaaaggagagatatgggtgttcccgagagaggaagaagccttgtcccaggagcaaagtgagggtgattgttccagaaatgtgagtgattcttttaaggctcaagcaaagcatgtgattcttctttataccttctatttctttgctgagtgtttctgttcttttgtttcaagcatgctgcaattgctcattaaagcatgtttatgatggctgtctgttttaaaattcttgtcagatggtttcaacatctttatcatctcaatgttggcatctgttaatggttttttctcaatcaaattgagattttcctggttcttggtattaccagtgattttaattgcatctggaaatttgggatttatgttgaaagactggatcttattgaaagattctgtttagcacccctcctttgataccacactggtgggtccaggttccccattcagctgttgacaccttcagggcagagaggtgggatggggtgaagggggtacctcattattgctggcccaggttagaagttcaggcttcccagtagatctctgctgataccaccctggtgccatgtcattccttgagtccaaaagtccctcccaattctgccttcttctctctacatatcggagtctccctatgtttgacttatatataatgtccagggtttttagagttagttaacaggaggcataagaaaaagtgtgtccactccatcttgtctggaactggaagttcaagtcgaatataagagagaggagaggaaattacaagccatgagactggagagttaggcaggttctacaccagctattctcaaagccctcttacactcttaaaaatttagaacttcaaagagcttttgattttgaaagttacatctatcaattattactgtttcaaaaattaaaattgagaaaattttatttattaatttgtttaaaaataacaataattattcaattacatgataatgtaagtaatgcttttcttaatgaaaaataattatattttccaaaacaaaaacaattaggaaaaagagtgtcattgttttagactttggtaaatctctctaatatctggctgaagagaagaatgctgattctttttttttttttttttttttgagacggagtctcgctctgtcacccaggctggagtgtagtggtgtgatctcggctcactgcaagctctgcctcccgggttcacgccattctcctgcctcagcctcccaagtagctgggactacaggcacccgccaccacgcccggctaatttttttgtatttttagtagagatggggtttcaccgtgttagccaggctggtctcgatctcctgacctcatgatccacccacctcagcctcccaaagcgctgggattacaggtgtgagacaccgcgcccagcccccgaatgctgattcttttatctgcttctgtattcaatctgttgtgatatgatgggtagcctctgaaacactccactgtatacttgtgaaagaatgaatgtgaaaaaggaaaatagatttgtagtattattattcaaattgttttgacctcagagaccacttggaaatgttttagggaacccccagaggaccttggatcatgctttgagaaccgcggctctagatatgttactatttcagtagcatctaagtacatgtggctgctgagcacttgtaatgtggctagtgcaaatgagagacaggacttccagctatatgtaatttaataaactcaaatttaaaaactggaacctcataaaatgttttgttgttgttgttaaacatgaccttatagttttggtaggaa

SEQ ID NO: 81 - protein, 273 aa, Homo sapiens
  MISC_FEATURE (1)..(273): NP_000890.1 kit ligand isoform b precursor [Homo sapiens] polypeptide sequence
MKKTQTWILTCIYLQLLLFNPLVKTEGICRNRVTNNVKDVTKLVANLPKDYMITLKYVPGMDVLPSHCWISEMVVQLSDSLTDLLDKFSNISEGLSNYSIIDKLVNIVDDLVECVKENSSKDLKKSFKSPEPRLFTPEEFFRIFNRSIDAFKDFVVASETSDCVVSSTLSPEKDSRVSVTKPFMLPPVAASSLRNDSSSSNRKAKNPPGDSSLHWAAMALPALFSLIIGFAFGALYWKKRQPSLTRAVENIQINEEDNEISMLQEKEREFQEV

SEQ ID NO: 82 - DNA, 5376 bp, Homo sapiens
  misc_feature (1)..(5376): NM_003994.5 Homo sapiens KIT ligand (KITLG), transcript variant a, mRNA polynucleotide sequence
gggcttcgctcgccgcctcgcgccgagactagaagcgctgcgggaagcagggacagtggagagggcgctgcgctcgggctacccaatgcgtggactatctgccgccgctgttcgtgcaatatgctggagctccagaacagctaaacggagtcgccacaccactgtttgtgctggatcgcagcgctgcctttccttatgaagaagacacaaacttggattctcacttgcatttatcttcagctgctcctatttaatcctctcgtcaaaactgaagggatctgcaggaatcgtgtgactaataatgtaaaagacgtcactaaattggtggcaaatcttccaaaagactacatgataaccctcaaatatgtccccgggatggatgttttgccaagtcattgttggataagcgagatggtagtacaattgtcagacagcttgactgatcttctggacaagttttcaaatatttctgaaggcttgagtaattattccatcatagacaaacttgtgaatatagtggatgaccttgtggagtgcgtgaaagaaaactcatctaaggatctaaaaaaatcattcaagagcccagaacccaggctctttactcctgaagaattctttagaatttttaatagatccattgatgccttcaaggactttgtagtggcatctgaaactagtgattgtgtggtttcttcaacattaagtcctgagaaagggaaggccaaaaatccccctggagactccagcctacactgggcagccatggcattgccagcattgttttctcttataattggctttgcttttggagccttatactggaagaagagacagccaagtcttacaagggcagttgaaaatatacaaattaatgaagaggataatgagataagtatgttgcaagagaaagagagagagtttcaagaagtgtaattgtggcttgtatcaacactgttactttcgtacattggctggtaacagttcatgtttgcttcataaatgaagcagctttaaacaaattcatattctgtctggagtgacagaccacatctttatctgttcttgctacccatgactttatatggatgattcagaaattggaacagaatgttttactgtgaaactggcactgaattaatcatctataaagaagaacttgcatggagcaggactctattttaaggactgcgggacttgggtctcatttagaacttgcagctgatgttggaagagaaagcacgtgtctcagactgcatgtaccatttgcatggctccagaaatgtctaaatgctgaaaaaacacctagctttattcttcagatacaaactgcagcctgtagttatcctggtctctgcaagtagatttcagcttggatagtgagggtaacaatttttctcaaagggatctggaaaaaatgtttaaaactcagtagtgtcagccactgtacagtgtagaaagcagtgggaactgtgattggatttggcaacatgtcagctttatagttgccgattagtgatatgggtctgatttcgatctcttcctgatgtaaaccatgctcacccatatcccactatacaaatgcaaatggttgcctggttccatttatgcaagggagccagtactgaattatgccttggcagaggggagactccaaaagagtcatcgcaggaagaagttaagaacactgaacatcagaacagtctgccaagaaggacattggcatcctgggaaagtccgccttttcccttgaccactatagggtgtataaatcgtgtttgcaaaatgtgttatgatgtgtttatattctaaaactattacagagctatgtaaagggacttaggagaaaatgctgaatgtaagatggtcccatttcaatttccaccatgggagagcctaaaaataaattatgacatttagtatctaaggttagaaaaccacgcccacatgctaatatgggtgttgaaaactaggttacttataatgcaaggaatcaggaaactttagttatttatagtataatcaccattatctgtttaaaggatccatttagttaaaatcgggcactctatattcattaaggtttatgaattaaaaagaaagctttatgtagttatgcatgtcagtttgctatttaaaatgtgtgacagtgtttgtcatattaagagtgaatttggcaggaattcccaagatggacattgtgcttttaaactagaacttgtaagacattatgtgaatatcccttgccaattttttttataataagaaaacatctgactaaagtcaaagaatgatttcttatggtttattttgatgaaagttcttttaacatgtcttgaatgtacacataaaggaatccaaagctttccattctaacttaatctttgtgataacattattgccatgttctacaaccgtaagatgacagttttcaatgtagtgacacaaaagggcatgaaaaactaactgctagctttcctttcatttcaaaagtccaagaatttctagtatatttggattttagcttctgttcaaagcaaatccagatgcaactccagtaagtggcctttgctcttttttgtaccaaagagcccagatgattcctacagtccctttcttctctaacatgctgtggttccttaaatatgagtaatttctctaagatataacccaggtgctttgagaagctgcattaaggtgttcaggccctcagatatcacatggtacacttgattagtaataaaaccagagatcaatttaaattgctgataggtcctgtctcagtgtgtggcattgactgttttcaggaaaatagatacagattaatatgagttatgcgtgtaggttgtgtatagattgagaagatagatacttctcaatctagtagtttgatttatttaaccaatggtttcagtttgcttgagcatatgaaaatcctgcttaatgtgcttaagagtataataaatgtgtacttttgtcctcaaacctagtagctgggttttaacactcatggacatggtcttaatcaatggagttaaataaacaaattcagcaagttattaaatctgacatggtaggagaggggagatgtgtcctgcttattaaatgtgttggtccattgaaagttacatggattgccaatttttaaaacactaaagttgaataaaatgcatgaacaatagaaaaatgctgaacattattttggatgctagctgcttggacattaactgtgttatttctgctttgagatgaaaatatatatttatctttgcttattttatcccagatgtgttctgaatatccttcttcataaatcatggaaaactcactgctgagatagtaaaccatgaaatcgccttttcagttggtgccatgtatctgacagttccatcttggaaggtttcaaaattaccttttaaaatgatctcagaagtctgtagattctcaatgatactgaaagctttgcacctctttggtagaaaccaggtctatttagaaaatggctttatgataaatgttgcctcctgagtgataatgaagtgttcctggatattgtattgtaatttaatgtgcttaccacactgccacattttaatgagtcagagaaaaattaatttttcttcaatacaataatagaacaagtagcctattctcttaaaaagtatgtgaaaagaaaattatgaaaaaatatgcatacctaatgaagtattggttttagtaagaattaaatacatttcattgagctttaaagtactttggagaaactttggggcacgttttcctactctaattcaactaaagttataaataaagagaaaaactcattcagaaatcatggattttaaaaatattttactgcagccaagttttcatttcaaaatgtaatttcagtttggagcttttaggcattatgtatatttaaaaaatatattcttcaaaaatgcattttggcatggtgggatggatgttgcaaaagatatccggagcctccagtctgtcattaactgatatggtaaatcacctctcttctttgggtctcaattttttatttatctatatggtaaactcagagatcactccttaggggtgagtcctattgcaatatgaccgacaaagaagacaaaatagcattgaaactaacccatacaaaatatccaactctggattctgtgaataagtatcttgaccataaaaagtcattgctgttcttgtttctaatgtaaatagtgtccattagtaaaagtgaaattcagtcttaagtagggtgaattggatcaccatttacacaagagatggctttttcctttgcttgaataaacattttggatcacctccaaagaatgaaaaccagtagtacgttttagtcatattagtcaggatgagaaactataagatgtgtgtaacatttggaaatgcaccaaagtgagcgtttaaatcttctcattttattgaaaactaagagcagaaaatgtaaaatgctcatgaaggttttgaatgccaaaagatattttagaatcaatttataaaggggtaattcattaattacactttaaaattggaaagtgggataagaaatctaaagtaaaccagcttatctttgaaacaatattattttgaaattggctttaaaataaaaccattcagattgaaattctaattagctcatttgtggagtttgatcacacaattcataatgttgctgctttccattaactagtcttgaaatgcctttgtttgtaaaaataaaataatggtactttcattttataacaaggtgtttttttcaagaaataatccatgctaaaatggatatttgtgatcctgaaatgtttactaagcattgtaaatttatttataactgccatctccaactacatccttatgatgtttttaacaataaaattaaaacaactgttaaactaaaaaccacaccgttttccagtacttgatctctgagctacaatactcactaaatataattttccaatcaaaatattctattctatattctaagggttaatatgtgattatagtgtccacttgccaccatttttttaaatcaatggacttgaaaagtattaatttagatggatgcgcagatataccctcagttcagtcatagattggagtttgcatataataatgtaaatgtatgtcgacactattctaaatagttctattatgactgaaatttaattaaataaaaaaggttgtaaaatgtgatgtgtatgtgtatatactgtatgtgtactttttaaaataggtgtatgtcccaacccttttttatacaggtttgaatttaaaattacatgatatatacatatactttattgttctaaataaagaattttatgcactctcaaaaaaaaaaaaaaaaaa

SEQ ID NO: 83 - protein, 18 aa, Artificial Sequence
  Description of artificial sequence: synthetic peptide
KRTADGSEFESPKKKRKV

SEQ ID NO: 84 - protein, 16 aa, Artificial Sequence
  Description of artificial sequence: synthetic peptide
KRPAATKKAGQAKKKK

SEQ ID NO: 85 - protein, 17 aa, Artificial Sequence
  Description of artificial sequence: synthetic peptide
KKTELQTTNAENKTKKL

SEQ ID NO: 86 - protein, 19 aa, Artificial Sequence
  Description of artificial sequence: synthetic peptide
KRGINDRNFWRGENGRKTR

SEQ ID NO: 87 - protein, 16 aa, Artificial Sequence
  Description of artificial sequence: synthetic peptide
RKSGKIAAIVVKRPRK

SEQ ID NO: 88 - protein, 7 aa, Artificial Sequence
  Description of artificial sequence: synthetic peptide
PKKKRKV

SEQ ID NO: 89 - protein, 30 aa, Artificial Sequence
  Description of artificial sequence: synthetic polypeptide
MDSLLMNRRKFLYQFKNVRWAKGRRETYLC

SEQ ID NO: 90 - RNA, 80 nt, Artificial Sequence
  Description of artificial sequence: gRNA scaffold nucleotide sequence; oligonucleotide sequence
  modified_base (78)..(80): um
  misc_feature (78)..(80): In embodiments, a nucleotide(s) is linked to the preceding 5' nucleotide by a 3' phosphorothioate internucleotide liknage
guuuuagagcuagaaauagcaaguuaaaauaaggcuaguccguuaucaacuugaaaaagugggaccgagucggugcuuuu

SEQ ID NO: 91 - DNA, 4104 bp, Streptococcus pyogenes
  misc_feature (1)..(4104): wild type spCas9 polynucleotide sequence
atggataagaaatactcaataggcttagatatcggcacaaatagcgtcggatgggcggtgatcactgatgattataaggttccgtctaaaaagttcaaggttctgggaaatacagaccgccacagtatcaaaaaaaatcttataggggctcttttatttggcagtggagagacagcggaagcgactcgtctcaaacggacagctcgtagaaggtatacacgtcggaagaatcgtatttgttatctacaggagattttttcaaatgagatggcgaaagtagatgatagtttctttcatcgacttgaagagtcttttttggtggaagaagacaagaagcatgaacgtcatcctatttttggaaatatagtagatgaagttgcttatcatgagaaatatccaactatctatcatctgcgaaaaaaattggcagattctactgataaagcggatttgcgcttaatctatttggccttagcgcatatgattaagtttcgtggtcattttttgattgagggagatttaaatcctgataatagtgatgtggacaaactatttatccagttggtacaaatctacaatcaattatttgaagaaaaccctattaacgcaagtagagtagatgctaaagcgattctttctgcacgattgagtaaatcaagacgattagaaaatctcattgctcagctccccggtgagaagagaaatggcttgtttgggaatctcattgctttgtcattgggattgacccctaattttaaatcaaattttgatttggcagaagatgctaaattacagctttcaaaagatacttacgatgatgatttagataatttattggcgcaaattggagatcaatatgctgatttgtttttggcagctaagaatttatcagatgctattttactttcagatatcctaagagtaaatagtgaaataactaaggctcccctatcagcttcaatgattaagcgctacgatgaacatcatcaagacttgactcttttaaaagctttagttcgacaacaacttccagaaaagtataaagaaatcttttttgatcaatcaaaaaacggatatgcaggttatattgatgggggagctagccaagaagaattttataaatttatcaaaccaattttagaaaaaatggatggtactgaggaattattggtgaaactaaatcgtgaagatttgctgcgcaagcaacggacctttgacaacggctctattccccatcaaattcacttgggtgagctgcatgctattttgagaagacaagaagacttttatccatttttaaaagacaatcgtgagaagattgaaaaaatcttgacttttcgaattccttattatgttggtccattggcgcgtggcaatagtcgttttgcatggatgactcggaagtctgaagaaacaattaccccatggaattttgaagaagttgtcgataaaggtgcttcagctcaatcatttattgaacgcatgacaaactttgataaaaatcttccaaatgaaaaagtactaccaaaacatagtttgctttatgagtattttacggtttataacgaattgacaaaggtcaaatatgttactgagggaatgcgaaaaccagcatttctttcaggtgaacagaagaaagccattgttgatttactcttcaaaacaaatcgaaaagtaaccgttaagcaattaaaagaagattatttcaaaaaaatagaatgttttgatagtgttgaaatttcaggagttgaagatagatttaatgcttcattaggcgcctaccatgatttgctaaaaattattaaagataaagattttttggataatgaagaaaatgaagatatcttagaggatattgttttaacattgaccttatttgaagatagggggatgattgaggaaagacttaaaacatatgctcacctctttgatgataaggtgatgaaacagcttaaacgtcgccgttatactggttggggacgtttgtctcgaaaattgattaatggtattagggataagcaatctggcaaaacaatattagattttttgaaatcagatggttttgccaatcgcaattttatgcagctgatccatgatgatagtttgacatttaaagaagatattcaaaaagcacaggtgtctggacaaggccatagtttacatgaacagattgctaacttagctggcagtcctgctattaaaaaaggtattttacagactgtaaaaattgttgatgaactggtcaaagtaatggggcataagccagaaaatatcgttattgaaatggcacgtgaaaatcagacaactcaaaagggccagaaaaattcgcgagagcgtatgaaacgaatcgaagaaggtatcaaagaattaggaagtcagattcttaaagagcatcctgttgaaaatactcaattgcaaaatgaaaagctctatctctattatctacaaaatggaagagacatgtatgtggaccaagaattagatattaatcgtttaagtgattatgatgtcgatcacattgttccacaaagtttcattaaagacgattcaatagacaataaggtactaacgcgttctgataaaaatcgtggtaaatcggataacgttccaagtgaagaagtagtcaaaaagatgaaaaactattggagacaacttctaaacgccaagttaatcactcaacgtaagtttgataatttaacgaaagctgaacgtggaggtttgagtgaacttgataaagctggttttatcaaacgccaattggttgaaactcgccaaatcactaagcatgtggcacaaattttggatagtcgcatgaatactaaatacgatgaaaatgataaacttattcgagaggttaaagtgattaccttaaaatctaaattagtttctgacttccgaaaagatttccaattctataaagtacgtgagattaacaattaccatcatgcccatgatgcgtatctaaatgccgtcgttggaactgctttgattaagaaatatccaaaacttgaatcggagtttgtctatggtgattataaagtttatgatgttcgtaaaatgattgctaagtctgagcaagaaataggcaaagcaaccgcaaaatatttcttttactctaatatcatgaacttcttcaaaacagaaattacacttgcaaatggagagattcgcaaacgccctctaatcgaaactaatggggaaactggagaaattgtctgggataaagggcgagattttgccacagtgcgcaaagtattgtccatgccccaagtcaatattgtcaagaaaacagaagtacagacaggcggattctccaaggagtcaattttaccaaaaagaaattcggacaagcttattgctcgtaaaaaagactgggatccaaaaaaatatggtggttttgatagtccaacggtagcttattcagtcctagtggttgctaaggtggaaaaagggaaatcgaagaagttaaaatccgttaaagagttactagggatcacaattatggaaagaagttcctttgaaaaaaatccgattgactttttagaagctaaaggatataaggaagttaaaaaagacttaatcattaaactacctaaatatagtctttttgagttagaaaacggtcgtaaacggatgctggctagtgccggagaattacaaaaaggaaatgagctggctctgccaagcaaatatgtgaattttttatatttagctagtcattatgaaaagttgaagggtagtccagaagataacgaacaaaaacaattgtttgtggagcagcataagcattatttagatgagattattgagcaaatcagtgaattttctaagcgtgttattttagcagatgccaatttagataaagttcttagtgcatataacaaacatagagacaaaccaatacgtgaacaagcagaaaatattattcatttatttacgttgacgaatcttggagctcccgctgcttttaaatattttgatacaacaattgatcgtaaacgatatacgtctacaaaagaagttttagatgccactcttatccatcaatccatcactggtctttatgaaacacgcattgatttgagtcagctaggaggtgactga

SEQ ID NO: 92 - protein, 1367 aa, Streptococcus pyogenes
  MISC_FEATURE (1)..(1367): spCas9 polypeptide sequence
MDKKYSIGLDIGTNSVGWAVITDDYKVPSKKFKVLGNTDRHSIKKNLIGALLFGSGETAEATRLKRTARRRYTRRKNRICYLQEIFSNEMAKVDDSFFHRLEESFLVEEDKKHERHPIFGNIVDEVAYHEKYPTIYHLRKKLADSTDKADLRLIYLALAHMIKFRGHFLIEGDLNPDNSDVDKLFIQLVQIYNQLFEENPINASRVDAKAILSARLSKSRRLENLIAQLPGEKRNGLFGNLIALSLGLTPNFKSNFDLAEDAKLQLSKDTYDDDLDNLLAQIGDQYADLFLAAKNLSDAILLSDILRVNSEITKAPLSASMIKRYDEHHQDLTLLKALVRQQLPEKYKEIFFDQSKNGYAGYIDGGASQEEFYKFIKPILEKMDGTEELLVKLNREDLLRKQRTFDNGSIPHQIHLGELHAILRRQEDFYPFLKDNREKIEKILTFRIPYYVGPLARGNSRFAWMTRKSEETITPWNFEEVVDKGASAQSFIERMTNFDKNLPNEKVLPKHSLLYEYFTVYNELTKVKYVTEGMRKPAFLSGEQKKAIVDLLFKTNRKVTVKQLKEDYFKKIECFDSVEISGVEDRFNASLGAYHDLLKIIKDKDFLDNEENEDILEDIVLTLTLFEDRGMIEERLKTYAHLFDDKVMKQLKRRRYTGWGRLSRKLINGIRDKQSGKTILDFLKSDGFANRNFMQLIHDDSLTFKEDIQKAQVSGQGHSLHEQIANLAGSPAIKKGILQTVKIVDELVKVMGHKPENIVIEMARENQTTQKGQKNSRERMKRIEEGIKELGSQILKEHPVENTQLQNEKLYLYYLQNGRDMYVDQELDINRLSDYDVDHIVPQSFIKDDSIDNKVLTRSDKNRGKSDNVPSEEVVKKMKNYWRQLLNAKLITQRKFDNLTKAERGGLSELDKAGFIKRQLVETRQITKHVAQILDSRMNTKYDENDKLIREVKVITLKSKLVSDFRKDFQFYKVREINNYHHAHDAYLNAVVGTALIKKYPKLESEFVYGDYKVYDVRKMIAKSEQEIGKATAKYFFYSNIMNFFKTEITLANGEIRKRPLIETNGETGEIVWDKGRDFATVRKVLSMPQVNIVKKTEVQTGGFSKESILPKRNSDKLIARKKDWDPKKYGGFDSPTVAYSVLVVAKVEKGKSKKLKSVKELLGITIMERSSFEKNPIDFLEAKGYKEVKKDLIIKLPKYSLFELENGRKRMLASAGELQKGNELALPSKYVNFLYLASHYEKLKGSPEDNEQKQLFVEQHKHYLDEIIEQISEFSKRVILADANLDKVLSAYNKHRDKPIREQAENIIHLFTLTNLGAPAAFKYFDTTIDRKRYTSTKEVLDATLIHQSITGLYETRIDLSQLGGD

SEQ ID NO: 93 - DNA, 4212 bp, Artificial Sequence
  Description of artificial sequence: wild-type Cas9 polynucleotide sequence
  misc_feature (5)..(58): RuvC domain
  misc_feature (718)..(764): RuvC domain
  misc_feature (772)..(901): HNH domain
  misc_feature (906)..(1101): RuvC domain
atggataaaaagtattctattggtttagacatcggcactaattccgttggatgggctgtcataaccgatgaatacaaagtaccttcaaagaaatttaaggtgttggggaacacagaccgtcattcgattaaaaagaatcttatcggtgccctcctattcgatagtggcgaaacggcagaggcgactcgcctgaaacgaaccgctcggagaaggtatacacgtcgcaagaaccgaatatgttacttacaagaaatttttagcaatgagatggccaaagttgacgattctttctttcaccgtttggaagagtccttccttgtcgaagaggacaagaaacatgaacggcaccccatctttggaaacatagtagatgaggtggcatatcatgaaaagtacccaacgatttatcacctcagaaaaaagctagttgactcaactgataaagcggacctgaggttaatctacttggctcttgcccatatgataaagttccgtgggcactttctcattgagggtgatctaaatccggacaactcggatgtcgacaaactgttcatccagttagtacaaacctataatcagttgtttgaagagaaccctataaatgcaagtggcgtggatgcgaaggctattcttagcgcccgcctctctaaatcccgacggctagaaaacctgatcgcacaattacccggagagaagaaaaatgggttgttcggtaaccttatagcgctctcactaggcctgacaccaaattttaagtcgaacttcgacttagctgaagatgccaaattgcagcttagtaaggacacgtacgatgacgatctcgacaatctactggcacaaattggagatcagtatgcggacttatttttggctgccaaaaaccttagcgatgcaatcctcctatctgacatactgagagttaatactgagattaccaaggcgccgttatccgcttcaatgatcaaaaggtacgatgaacatcaccaagacttgacacttctcaaggccctagtccgtcagcaactgcctgagaaatataaggaaatattctttgatcagtcgaaaaacgggtacgcaggttatattgacggcggagcgagtcaagaggaattctacaagtttatcaaacccatattagagaagatggatgggacggaagagttgcttgtaaaactcaatcgcgaagatctactgcgaaagcagcggactttcgacaacggtagcattccacatcaaatccacttaggcgaattgcatgctatacttagaaggcaggaggatttttatccgttcctcaaagacaatcgtgaaaagattgagaaaatcctaacctttcgcataccttactatgtgggacccctggcccgagggaactctcggttcgcatggatgacaagaaagtccgaagaaacgattactccatggaattttgaggaagttgtcgataaaggtgcgtcagctcaatcgttcatcgagaggatgaccaactttgacaagaatttaccgaacgaaaaagtattgcctaagcacagtttactttacgagtatttcacagtgtacaatgaactcacgaaagttaagtatgtcactgagggcatgcgtaaacccgcctttctaagcggagaacagaagaaagcaatagtagatctgttattcaagaccaaccgcaaagtgacagttaagcaattgaaagaggactactttaagaaaattgaatgcttcgattctgtcgagatctccggggtagaagatcgatttaatgcgtcacttggtacgtatcatgacctcctaaagataattaaagataaggacttcctggataacgaagagaatgaagatatcttagaagatatagtgttgactcttaccctctttgaagatcgggaaatgattgaggaaagactaaaaacatacgctcacctgttcgacgataaggttatgaaacagttaaagaggcgtcgctatacgggctggggacgattgtcgcggaaacttatcaacgggataagagacaagcaaagtggtaaaactattctcgattttctaaagagcgacggcttcgccaataggaactttatgcagctgatccatgatgactctttaaccttcaaagaggatatacaaaaggcacaggtttccggacaaggggactcattgcacgaacatattgcgaatcttgctggttcgccagccatcaaaaagggcatactccagacagtcaaagtagtggatgagctagttaaggtcatgggacgtcacaaaccggaaaacattgtaatcgagatggcacgcgaaaatcaaacgactcagaaggggcaaaaaaacagtcgagagcggatgaagagaatagaagagggtattaaagaactgggcagccagatcttaaaggagcatcctgtggaaaatacccaattgcagaacgagaaactttacctctattacctacaaaatggaagggacatgtatgttgatcaggaactggacataaaccgtttatctgattacgacgtcgatcacattgtaccccaatcctttttgaaggacgattcaatcgacaataaagtgcttacacgctcggataagaaccgagggaaaagtgacaatgttccaagcgaggaagtcgtaaagaaaatgaagaactattggcggcagctcctaaatgcgaaactgataacgcaaagaaagttcgataacttaactaaagctgagaggggtggcttgtctgaacttgacaaggccggatttattaaacgtcagctcgtggaaacccgccaaatcacaaagcatgttgcacagatactagattcccgaatgaatacgaaatacgacgagaacgataagctgattcgggaagtcaaagtaatcactttaaagtcaaaattggtgtcggacttcagaaaggattttcaattctataaagttagggagataaataactaccaccatgcgcacgacgcttatcttaatgccgtcgtagggaccgcactcattaagaaatacccgaagctagaaagtgagtttgtgtatggtgattacaaagtttatgacgtccgtaagatgatcgcgaaaagcgaacaggagataggcaaggctacagccaaatacttcttttattctaacattatgaatttctttaagacggaaatcactctggcaaacggagagatacgcaaacgacctttaattgaaaccaatggggagacaggtgaaatcgtatgggataagggccgggacttcgcgacggtgagaaaagttttgtccatgccccaagtcaacatagtaaagaaaactgaggtgcagaccggagggttttcaaaggaatcgattcttccaaaaaggaatagtgataagctcatcgctcgtaaaaaggactgggacccgaaaaagtacggtggcttcgatagccctacagttgcctattctgtcctagtagtggcaaaagttgagaagggaaaatccaagaaactgaagtcagtcaaagaattattggggataacgattatggagcgctcgtcttttgaaaagaaccccatcgacttccttgaggcgaaaggttacaaggaagtaaaaaaggatctcataattaaactaccaaagtatagtctgtttgagttagaaaatggccgaaaacggatgttggctagcgccggagagcttcaaaaggggaacgaactcgcactaccgtctaaatacgtgaatttcctgtatttagcgtcccattacgagaagttgaaaggttcacctgaagataacgaacagaagcaactttttgttgagcagcacaaacattatctcgacgaaatcatagagcaaatttcggaattcagtaagagagtcatcctagctgatgccaatctggacaaagtattaagcgcatacaacaagcacagggataaacccatacgtgagcaggcggaaaatattatccatttgtttactcttaccaacctcggcgctccagccgcattcaagtattttgacacaacgatagatcgcaaacgatacacttctaccaaggaggtgctagacgcgacactgattcaccaatccatcacgggattatatgaaactcggatagatttgtcacagcttgggggtgacggatcccccaagaagaagaggaaagtctcgagcgactacaaagaccatgacggtgattataaagatcatgacatcgattacaaggatgacgatgacaaggctgcagga

SEQ ID NO: 94 - protein, 1368 aa, Artificial Sequence
  Description of artificial sequence: exemplary catalytically active Cas9 nickase (nCas9) polypeptide sequence
MDKKYSIGLAIGTNSVGWAVITDEYKVPSKKFKVLGNTDRHSIKKNLIGALLFDSGETAEATRLKRTARRRYTRRKNRICYLQEIFSNEMAKVDDSFFHRLEESFLVEEDKKHERHPIFGNIVDEVAYHEKYPTIYHLRKKLVDSTDKADLRLIYLALAHMIKFRGHFLIEGDLNPDNSDVDKLFIQLVQTYNQLFEENPINASGVDAKAILSARLSKSRRLENLIAQLPGEKKNGLFGNLIALSLGLTPNFKSNFDLAEDAKLQLSKDTYDDDLDNLLAQIGDQYADLFLAAKNLSDAILLSDILRVNTEITKAPLSASMIKRYDEHHQDLTLLKALVRQQLPEKYKEIFFDQSKNGYAGYIDGGASQEEFYKFIKPILEKMDGTEELLVKLNREDLLRKQRTFDNGSIPHQIHLGELHAILRRQEDFYPFLKDNREKIEKILTFRIPYYVGPLARGNSRFAWMTRKSEETITPWNFEEVVDKGASAQSFIERMTNFDKNLPNEKVLPKHSLLYEYFTVYNELTKVKYVTEGMRKPAFLSGEQKKAIVDLLFKTNRKVTVKQLKEDYFKKIECFDSVEISGVEDRFNASLGTYHDLLKIIKDKDFLDNEENEDILEDIVLTLTLFEDREMIEERLKTYAHLFDDKVMKQLKRRRYTGWGRLSRKLINGIRDKQSGKTILDFLKSDGFANRNFMQLIHDDSLTFKEDIQKAQVSGQGDSLHEHIANLAGSPAIKKGILQTVKVVDELVKVMGRHKPENIVIEMARENQTTQKGQKNSRERMKRIEEGIKELGSQILKEHPVENTQLQNEKLYLYYLQNGRDMYVDQELDINRLSDYDVDHIVPQSFLKDDSIDNKVLTRSDKNRGKSDNVPSEEVVKKMKNYWRQLLNAKLITQRKFDNLTKAERGGLSELDKAGFIKRQLVETRQITKHVAQILDSRMNTKYDENDKLIREVKVITLKSKLVSDFRKDFQFYKVREINNYHHAHDAYLNAVVGTALIKKYPKLESEFVYGDYKVYDVRKMIAKSEQEIGKATAKYFFYSNIMNFFKTEITLANGEIRKRPLIETNGETGEIVWDKGRDFATVRKVLSMPQVNIVKKTEVQTGGFSKESILPKRNSDKLIARKKDWDPKKYGGFDSPTVAYSVLVVAKVEKGKSKKLKSVKELLGITIMERSSFEKNPIDFLEAKGYKEVKKDLIIKLPKYSLFELENGRKRMLASAGELQKGNELALPSKYVNFLYLASHYEKLKGSPEDNEQKQLFVEQHKHYLDEIIEQISEFSKRVILADANLDKVLSAYNKHRDKPIREQAENIIHLFTLTNLGAPAAFKYFDTTIDRKRYTSTKEVLDATLIHQSITGLYETRIDLSQLGGD

SEQ ID NO: 95 - DNA, 4107 bp, Streptococcus pyogenes
  misc_feature (1)..(4107): Cas9 from Streptococcus pyogenes (NCBI Ref. Seq.: NC_002737.2) polynucleotide sequence
atggataagaaatactcaataggcttagatatcggcacaaatagcgtcggatgggcggtgatcactgatgaatataaggttccgtctaaaaagttcaaggttctgggaaatacagaccgccacagtatcaaaaaaaatcttataggggctcttttatttgacagtggagagacagcggaagcgactcgtctcaaacggacagctcgtagaaggtatacacgtcggaagaatcgtatttgttatctacaggagattttttcaaatgagatggcgaaagtagatgatagtttctttcatcgacttgaagagtcttttttggtggaagaagacaagaagcatgaacgtcatcctatttttggaaatatagtagatgaagttgcttatcatgagaaatatccaactatctatcatctgcgaaaaaaattggtagattctactgataaagcggatttgcgcttaatctatttggccttagcgcatatgattaagtttcgtggtcattttttgattgagggagatttaaatcctgataatagtgatgtggacaaactatttatccagttggtacaaacctacaatcaattatttgaagaaaaccctattaacgcaagtggagtagatgctaaagcgattctttctgcacgattgagtaaatcaagacgattagaaaatctcattgctcagctccccggtgagaagaaaaatggcttatttgggaatctcattgctttgtcattgggtttgacccctaattttaaatcaaattttgatttggcagaagatgctaaattacagctttcaaaagatacttacgatgatgatttagataatttattggcgcaaattggagatcaatatgctgatttgtttttggcagctaagaatttatcagatgctattttactttcagatatcctaagagtaaatactgaaataactaaggctcccctatcagcttcaatgattaaacgctacgatgaacatcatcaagacttgactcttttaaaagctttagttcgacaacaacttccagaaaagtataaagaaatcttttttgatcaatcaaaaaacggatatgcaggttatattgatgggggagctagccaagaagaattttataaatttatcaaaccaattttagaaaaaatggatggtactgaggaattattggtgaaactaaatcgtgaagatttgctgcgcaagcaacggacctttgacaacggctctattccccatcaaattcacttgggtgagctgcatgctattttgagaagacaagaagacttttatccatttttaaaagacaatcgtgagaagattgaaaaaatcttgacttttcgaattccttattatgttggtccattggcgcgtggcaatagtcgttttgcatggatgactcggaagtctgaagaaacaattaccccatggaattttgaagaagttgtcgataaaggtgcttcagctcaatcatttattgaacgcatgacaaactttgataaaaatcttccaaatgaaaaagtactaccaaaacatagtttgctttatgagtattttacggtttataacgaattgacaaaggtcaaatatgttactgaaggaatgcgaaaaccagcatttctttcaggtgaacagaagaaagccattgttgatttactcttcaaaacaaatcgaaaagtaaccgttaagcaattaaaagaagattatttcaaaaaaatagaatgttttgatagtgttgaaatttcaggagttgaagatagatttaatgcttcattaggtacctaccatgatttgctaaaaattattaaagataaagattttttggataatgaagaaaatgaagatatcttagaggatattgttttaacattgaccttatttgaagatagggagatgattgaggaaagacttaaaacatatgctcacctctttgatgataaggtgatgaaacagcttaaacgtcgccgttatactggttggggacgtttgtctcgaaaattgattaatggtattagggataagcaatctggcaaaacaatattagattttttgaaatcagatggttttgccaatcgcaattttatgcagctgatccatgatgatagtttgacatttaaagaagacattcaaaaagcacaagtgtctggacaaggcgatagtttacatgaacatattgcaaatttagctggtagccctgctattaaaaaaggtattttacagactgtaaaagttgttgatgaattggtcaaagtaatggggcggcataagccagaaaatatcgttattgaaatggcacgtgaaaatcagacaactcaaaagggccagaaaaattcgcgagagcgtatgaaacgaatcgaagaaggtatcaaagaattaggaagtcagattcttaaagagcatcctgttgaaaatactcaattgcaaaatgaaaagctctatctctattatctccaaaatggaagagacatgtatgtggaccaagaattagatattaatcgtttaagtgattatgatgtcgatcacattgttccacaaagtttccttaaagacgattcaatagacaataaggtcttaacgcgttctgataaaaatcgtggtaaatcggataacgttccaagtgaagaagtagtcaaaaagatgaaaaactattggagacaacttctaaacgccaagttaatcactcaacgtaagtttgataatttaacgaaagctgaacgtggaggtttgagtgaacttgataaagctggttttatcaaacgccaattggttgaaactcgccaaatcactaagcatgtggcacaaattttggatagtcgcatgaatactaaatacgatgaaaatgataaacttattcgagaggttaaagtgattaccttaaaatctaaattagtttctgacttccgaaaagatttccaattctataaagtacgtgagattaacaattaccatcatgcccatgatgcgtatctaaatgccgtcgttggaactgctttgattaagaaatatccaaaacttgaatcggagtttgtctatggtgattataaagtttatgatgttcgtaaaatgattgctaagtctgagcaagaaataggcaaagcaaccgcaaaatatttcttttactctaatatcatgaacttcttcaaaacagaaattacacttgcaaatggagagattcgcaaacgccctctaatcgaaactaatggggaaactggagaaattgtctgggataaagggcgagattttgccacagtgcgcaaagtattgtccatgccccaagtcaatattgtcaagaaaacagaagtacagacaggcggattctccaaggagtcaattttaccaaaaagaaattcggacaagcttattgctcgtaaaaaagactgggatccaaaaaaatatggtggttttgatagtccaacggtagcttattcagtcctagtggttgctaaggtggaaaaagggaaatcgaagaagttaaaatccgttaaagagttactagggatcacaattatggaaagaagttcctttgaaaaaaatccgattgactttttagaagctaaaggatataaggaagttaaaaaagacttaatcattaaactacctaaatatagtctttttgagttagaaaacggtcgtaaacggatgctggctagtgccggagaattacaaaaaggaaatgagctggctctgccaagcaaatatgtgaattttttatatttagctagtcattatgaaaagttgaagggtagtccagaagataacgaacaaaaacaattgtttgtggagcagcataagcattatttagatgagattattgagcaaatcagtgaattttctaagcgtgttattttagcagatgccaatttagataaagttcttagtgcatataacaaacatagagacaaaccaatacgtgaacaagcagaaaatattattcatttatttacgttgacgaatcttggagctcccgctgcttttaaatattttgatacaacaattgatcgtaaacgatatacgtctacaaaagaagttttagatgccactcttatccatcaatccatcactggtctttatgaaacacgcattgatttgagtcagctaggaggtgactga

SEQ ID NO: 96 - protein, 1368 aa, Artificial Sequence
  Description of sequence: catalytically inactive Cas9 (dCas9) polypeptide sequence
  MISC_FEATURE (5)..(58): RuvC domain
  MISC_FEATURE (718)..(764): RuvC domain
  MISC_FEATURE (773)..(902): HNH domain
  MISC_FEATURE (907)..(1102): RuvC domain
MDKKYSIGLAIGTNSVGWAVITDEYKVPSKKFKVLGNTDRHSIKKNLIGALLFDSGETAEATRLKRTARRRYTRRKNRICYLQEIFSNEMAKVDDSFFHRLEESFLVEEDKKHERHPIFGNIVDEVAYHEKYPTIYHLRKKLVDSTDKADLRLIYLALAHMIKFRGHFLIEGDLNPDNSDVDKLFIQLVQTYNQLFEENPINASGVDAKAILSARLSKSRRLENLIAQLPGEKKNGLFGNLIALSLGLTPNFKSNFDLAEDAKLQLSKDTYDDDLDNLLAQIGDQYADLFLAAKNLSDAILLSDILRVNTEITKAPLSASMIKRYDEHHQDLTLLKALVRQQLPEKYKEIFFDQSKNGYAGYIDGGASQEEFYKFIKPILEKMDGTEELLVKLNREDLLRKQRTFDNGSIPHQIHLGELHAILRRQEDFYPFLKDNREKIEKILTFRIPYYVGPLARGNSRFAWMTRKSEETITPWNFEEVVDKGASAQSFIERMTNFDKNLPNEKVLPKHSLLYEYFTVYNELTKVKYVTEGMRKPAFLSGEQKKAIVDLLFKTNRKVTVKQLKEDYFKKIECFDSVEISGVEDRFNASLGTYHDLLKIIKDKDFLDNEENEDILEDIVLTLTLFEDREMIEERLKTYAHLFDDKVMKQLKRRRYTGWGRLSRKLINGIRDKQSGKTILDFLKSDGFANRNFMQLIHDDSLTFKEDIQKAQVSGQGDSLHEHIANLAGSPAIKKGILQTVKVVDELVKVMGRHKPENIVIEMARENQTTQKGQKNSRERMKRIEEGIKELGSQILKEHPVENTQLQNEKLYLYYLQNGRDMYVDQELDINRLSDYDVDAIVPQSFLKDDSIDNKVLTRSDKNRGKSDNVPSEEVVKKMKNYWRQLLNAKLITQRKFDNLTKAERGGLSELDKAGFIKRQLVETRQITKHVAQILDSRMNTKYDENDKLIREVKVITLKSKLVSDFRKDFQFYKVREINNYHHAHDAYLNAVVGTALIKKYPKLESEFVYGDYKVYDVRKMIAKSEQEIGKATAKYFFYSNIMNFFKTEITLANGEIRKRPLIETNGETGEIVWDKGRDFATVRKVLSMPQVNIVKKTEVQTGGFSKESILPKRNSDKLIARKKDWDPKKYGGFDSPTVAYSVLVVAKVEKGKSKKLKSVKELLGITIMERSSFEKNPIDFLEAKGYKEVKKDLIIKLPKYSLFELENGRKRMLASAGELQKGNELALPSKYVNFLYLASHYEKLKGSPEDNEQKQLFVEQHKHYLDEIIEQISEFSKRVILADANLDKVLSAYNKHRDKPIREQAENIIHLFTLTNLGAPAAFKYFDTTIDRKRYTSTKEVLDATLIHQSITGLYETRIDLSQLGGD

SEQ ID NO: 97 - protein, 345 aa, Sulfolobus islandicus
  MISC_FEATURE (1)..(345): tr|F0NN87|F0NN87_SULIHCRISPR-associatedCasx protein OS = Sulfolobus islandicus (strain HVE10/4) GN = SiH_0402 PE=4 SV=1); CasX polypeptide sequence
MEVPLYNIFGDNYIIQVATEAENSTIYNNKVEIDDEELRNVLNLAYKIAKNNEDAAAERRGKAKKKKGEEGETTTSNIILPLSGNDKNPWTETLKCYNFPTTVALSEVFKNFSQVKECEEVSAPSFVKPEFYEFGRSPGMVERTRRVKLEVEPHYLIIAAAGWVLTRLGKAKVSEGDYVGVNVFTPTRGILYSLIQNVNGIVPGIKPETAFGLWIARKVVSSVTNPNVSVVRIYTISDAVGQNPTTINGGFSIDLTKLLEKRYLLSERLEAIARNALSISSNMRERYIVLANYIYEYLTGSKRLEDLLYFANRDLIMNLNSDDGKVRDLKLISAYVNGELIRGEG

SEQ ID NO: 98 - protein, 345 aa, Sulfolobus islandicus
  MISC_FEATURE (1)..(345): tr|F0NH53|F0NH53_SULIR CRISPR associated protein, Casx OS = Sulfolobus islandicus (strain REY15A) GN=SiRe_0771 PE=4 SV=1); CasX polypeptide sequence
MEVPLYNIFGDNYIIQVATEAENSTIYNNKVEIDDEELRNVLNLAYKIAKNNEDAAAERRGKAKKKKGEEGETTTSNIILPLSGNDKNPWTETLKCYNFPTTVALSEVFKNFSQVKECEEVSAPSFVKPEFYKFGRSPGMVERTRRVKLEVEPHYLIMAAAGWVLTRLGKAKVSEGDYVGVNVFTPTRGILYSLIQNVNGIVPGIKPETAFGLWIARKVVSSVTNPNVSVVSIYTISDAVGQNPTTINGGFSIDLTKLLEKRDLLSERLEAIARNALSISSNMRERYIVLANYIYEYLTGSKRLEDLLYFANRDLIMNLNSDDGKVRDLKLISAYVNGELIRGEG

SEQ ID NO: 99 - protein, 987 aa, Deltaproteobacteria
  MISC_FEATURE (1)..(987): CasX polypeptide sequence
MEKRINKIRKKLSADNATKPVSRSGPMKTLLVRVMTDDLKKRLEKRRKKPEVMPQVISNNAANNLRMLLDDYTKMKEAILQVYWQEFKDDHVGLMCKFAQPASKKIDQNKLKPEMDEKGNLTTAGFACSQCGQPLFVYKLEQVSEKGKAYTNYFGRCNVAEHEKLILLAQLKPVKDSDEAVTYSLGKFGQRALDFYSIHVTKESTHPVKPLAQIAGNRYASGPVGKALSDACMGTIASFLSKYQDIIIEHQKVVKGNQKRLESLRELAGKENLEYPSVTLPPQPHTKEGVDFAYNEVIARVRMWVNLNLWQKLKLSRDDAKPLLRLKGFPSFPVVERRENEVDWWNTINEVKKLIDAKRDMGRVFWSGVTAEKRNTILEGYNYLPNENDHKKREGSLENPKKPAKRQFGDLLLYLEKKYAGDWGKVFDEAWERIDKKIAGLTSHIEREEARNAEDAQSKAVLTDWLRAKASFVLERLKEMDEKEFYACEIQLQKWYGDLRGNPFAVEAENRVVDISGFSIGSDGHSIQYRNLLAWKYLENGKREFYLLMNYGKKGRIRFTDGTDIKKSGKWQGLLYGGGKAKVIDLTFDPDDEQLIILPLAFGTRQGREFIWNDLLSLETGLIKLANGRVIEKTIYNKKIGRDEPALFVALTFERREVVDPSNIKPVNLIGVARGENIPAVIALTDPEGCPLPEFKDSSGGPTDILRIGEGYKEKQRAIQAAKEVEQRRAGGYSRKFASKSRNLADDMVRNSARDLFYHAVTHDAVLVFANLSRGFGRQGKRTFMTERQYTKMEDWLTAKLAYEGLTSKTYLSKTLAQYTSKTCSNCGFTITYADMDVMLVRLKKTSDGWATTLNNKELKAEYQITYYNRYKRQTVEKELSAELDRLSEESGNNDISKWTKGRRDEALFLLKKRFSHRPVQEQFVCLDCGHEVHAAEQAALNIARSWLFLNSNSTEFKSYKSGKQPFVGAWQAFYKRRLKEVWKPNA

SEQ ID NO: 100 - protein, 1210 aa, Parcubacteria group bacterium
  MISC_FEATURE (1)..(1210): APG80656.1 CRISPR-associated protein CasY [uncultured Parcubacteria group bacterium]; CasY polypeptide sequence
MSKRHPRISGVKGYRLHAQRLEYTGKSGAMRTIKYPLYSSPSGGRTVPREIVSAINDDYVGLYGLSNFDDLYNAEKRNEEKVYSVLDFWYDCVQYGAVFSYTAPGLLKNVAEVRGGSYELTKTLKGSHLYDELQIDKVIKFLNKKEISRANGSLDKLKKDIIDCFKAEYRERHKDQCNKLADDIKNAKKDAGASLGERQKKLFRDFFGISEQSENDKPSFTNPLNLTCCLLPFDTVNNNRNRGEVLFNKLKEYAQKLDKNEGSLEMWEYIGIGNSGTAFSNFLGEGFLGRLRENKITELKKAMMDITDAWRGQEQEEELEKRLRILAALTIKLREPKFDNHWGGYRSDINGKLSSWLQNYINQTVKIKEDLKGHKKDLKKAKEMINRFGESDTKEEAVVSSLLESIEKIVPDDSADDEKPDIPAIAIYRRFLSDGRLTLNRFVQREDVQEALIKERLEAEKKKKPKKRKKKSDAEDEKETIDFKELFPHLAKPLKLVPNFYGDSKRELYKKYKNAAIYTDALWKAVEKIYKSAFSSSLKNSFFDTDFDKDFFIKRLQKIFSVYRRFNTDKWKPIVKNSFAPYCDIVSLAENEVLYKPKQSRSRKSAAIDKNRVRLPSTENIAKAGIALARELSVAGFDWKDLLKKEEHEEYIDLIELHKTALALLLAVTETQLDISALDFVENGTVKDFMKTRDGNLVLEGRFLEMFSQSIVFSELRGLAGLMSRKEFITRSAIQTMNGKQAELLYIPHEFQSAKITTPKEMSRAFLDLAPAEFATSLEPESLSEKSLLKLKQMRYYPHYFGYELTRTGQGIDGGVAENALRLEKSPVKKREIKCKQYKTLGRGQNKIVLYVRSSYYQTQFLEWFLHRPKNVQTDVAVSGSFLIDEKKVKTRWNYDALTVALEPVSGSERVFVSQPFTIFPEKSAEEEGQRYLGIDIGEYGIAYTALEITGDSAKILDQNFISDPQLKTLREEVKGLKLDQRRGTFAMPSTKIARIRESLVHSLRNRIHHLALKHKAKIVYELEVSRFEEGKQKIKKVYATLKKADVYSEIDADKNLQTTVWGKLAVASEISASYTSQFCGACKKLWRAEMQVDETITTQELIGTVRVIKGGTLIDAIKDFMRPPIFDENDTPFPKYRDFCDKHHISKKMRGNSCLFICPFCRANADADIQASQTIALLRYVKEEKKVEDYFERFRKLKNIKVLGQMKKI

SEQ ID NO: 101 - protein, 1082 aa, Neisseria meningitidis
  MISC_FEATURE (1)..(1082): NCBI Reference:  WP_002235162.1; type II CRISPR RNA-guided endonuclease Cas9; Nme1Cas9 polypeptide sequence
MAAFKPNPINYILGLDIGIASVGWAMVEIDEDENPICLIDLGVRVFERAEVPKTGDSLAMARRLARSVRRLTRRRAHRLLRARRLLKREGVLQAADFDENGLIKSLPNTPWQLRAAALDRKLTPLEWSAVLLHLIKHRGYLSQRKNEGETADKELGALLKGVADNAHALQTGDFRTPAELALNKFEKESGHIRNQRGDYSHTFSRKDLQAELILLFEKQKEFGNPHVSGGLKEGIETLLMTQRPALSGDAVQKMLGHCTFEPAEPKAAKNTYTAERFIWLTKLNNLRILEQGSERPLTDTERATLMDEPYRKSKLTYAQARKLLGLEDTAFFKGLRYGKDNAEASTLMEMKAYHAISRALEKEGLKDKKSPLNLSPELQDEIGTAFSLFKTDEDITGRLKDRIQPEILEALLKHISFDKFVQISLKALRRIVPLMEQGKRYDEACAEIYGDHYGKKNTEEKIYLPPIPADEIRNPVVLRALSQARKVINGVVRRYGSPARIHIETAREVGKSFKDRKEIEKRQEENRKDREKAAAKFREYFPNFVGEPKSKDILKLRLYEQQHGKCLYSGKEINLGRLNEKGYVEIDHALPFSRTWDDSFNNKVLVLGSENQNKGNQTPYEYFNGKDNSREWQEFKARVETSRFPRSKKQRILLQKFDEDGFKERNLNDTRYVNRFLCQFVADRMRLTGKGKKRVFASNGQITNLLRGFWGLRKVRAENDRHHALDAVVVACSTVAMQQKITRFVRYKEMNAFDGKTIDKETGEVLHQKTHFPQPWEFFAQEVMIRVFGKPDGKPEFEEADTPEKLRTLLAEKLSSRPEAVHEYVTPLFVSRAPNRKMSGQGHMETVKSAKRLDEGVSVLRVPLTQLKLKDLEKMVNREREPKLYEALKARLEAHKDDPAKAFAEPFYKYDKAGNRTQQVKAVRVEQVQKTGVWVRNHNGIADNATMVRVDVFEKGDKYYLVPIYSWQVAKGILPDRAVVQGKDEEDWQLIDDSFNFKFSLHPNDLVEVITKKARMFGYFASCHRGTGNINIRIHDLDHKIGKNGILEGIGVKTALSFQKYQIDELGKEIRPCRLKKRPPVR

SEQ ID NO: 102 - protein, 1082 aa, Neisseria meningitidis
  MISC_FEATURE (1)..(1082): NCBI Reference:  WP_002230835; type II CRISPR RNA-guided endonuclease Cas9; Nme2Cas9 polypeptide sequence
MAAFKPNPINYILGLDIGIASVGWAMVEIDEEENPIRLIDLGVRVFERAEVPKTGDSLAMARRLARSVRRLTRRRAHRLLRARRLLKREGVLQAADFDENGLIKSLPNTPWQLRAAALDRKLTPLEWSAVLLHLIKHRGYLSQRKNEGETADKELGALLKGVANNAHALQTGDFRTPAELALNKFEKESGHIRNQRGDYSHTFSRKDLQAELILLFEKQKEFGNPHVSGGLKEGIETLLMTQRPALSGDAVQKMLGHCTFEPAEPKAAKNTYTAERFIWLTKLNNLRILEQGSERPLTDTERATLMDEPYRKSKLTYAQARKLLGLEDTAFFKGLRYGKDNAEASTLMEMKAYHAISRALEKEGLKDKKSPLNLSSELQDEIGTAFSLFKTDEDITGRLKDRVQPEILEALLKHISFDKFVQISLKALRRIVPLMEQGKRYDEACAEIYGDHYGKKNTEEKIYLPPIPADEIRNPVVLRALSQARKVINGVVRRYGSPARIHIETAREVGKSFKDRKEIEKRQEENRKDREKAAAKFREYFPNFVGEPKSKDILKLRLYEQQHGKCLYSGKEINLVRLNEKGYVEIDHALPFSRTWDDSFNNKVLVLGSENQNKGNQTPYEYFNGKDNSREWQEFKARVETSRFPRSKKQRILLQKFDEDGFKECNLNDTRYVNRFLCQFVADHILLTGKGKRRVFASNGQITNLLRGFWGLRKVRAENDRHHALDAVVVACSTVAMQQKITRFVRYKEMNAFDGKTIDKETGKVLHQKTHFPQPWEFFAQEVMIRVFGKPDGKPEFEEADTPEKLRTLLAEKLSSRPEAVHEYVTPLFVSRAPNRKMSGAHKDTLRSAKRFVKHNEKISVKRVWLTEIKLADLENMVNYKNGREIELYEALKARLEAYGGNAKQAFDPKDNPFYKKGGQLVKAVRVEKTQESGVLLNKKNAYTIADNGDMVRVDVFCKVDKKGKNQYFIVPIYAWQVAENILPDIDCKGYRIDDSYTFCFSLHKYDLIAFQKDEKSKVEFAYYINCDSSNGRFYLAWHDKGSKEQQFRISTQNLVLIQKYQVNELGKEIRPCRLKKRPPVR

SEQ ID NO: 103 - protein, 1300 aa, Francisella novicida
  MISC_FEATURE (1)..(1300): wild type Cpf1 polypeptide sequence
MSIYQEFVNKYSLSKTLRFELIPQGKTLENIKARGLILDDEKRAKDYKKAKQIIDKYHQFFIEEILSSVCISEDLLQNYSDVYFKLKKSDDDNLQKDFKSAKDTIKKQISEYIKDSEKFKNLFNQNLIDAKKGQESDLILWLKQSKDNGIELFKANSDITDIDEALEIIKSFKGWTTYFKGFHENRKNVYSSNDIPTSIIYRIVDDNLPKFLENKAKYESLKDKAPEAINYEQIKKDLAEELTFDIDYKTSEVNQRVFSLDEVFEIANFNNYLNQSGITKFNTIIGGKFVNGENTKRKGINEYINLYSQQINDKTLKKYKMSVLFKQILSDTESKSFVIDKLEDDSDVVTTMQSFYEQIAAFKTVEEKSIKETLSLLFDDLKAQKLDLSKIYFKNDKSLTDLSQQVFDDYSVIGTAVLEYITQQIAPKNLDNPSKKEQELIAKKTEKAKYLSLETIKLALEEFNKHRDIDKQCRFEEILANFAAIPMIFDEIAQNKDNLAQISIKYQNQGKKDLLQASAEDDVKAIKDLLDQTNNLLHKLKIFHISQSEDKANILDKDEHFYLVFEECYFELANIVPLYNKIRNYITQKPYSDEKFKLNFENSTLANGWDKNKEPDNTAILFIKDDKYYLGVMNKKNNKIFDDKAIKENKGEGYKKIVYKLLPGANKMLPKVFFSAKSIKFYNPSEDILRIRNHSTHTKNGSPQKGYEKFEFNIEDCRKFIDFYKQSISKHPEWKDFGFRFSDTQRYNSIDEFYREVENQGYKLTFENISESYIDSVVNQGKLYLFQIYNKDFSAYSKGRPNLHTLYWKALFDERNLQDVVYKLNGEAELFYRKQSIPKKITHPAKEAIANKNKDNPKKESVFEYDLIKDKRFTEDKFFFHCPITINFKSSGANKFNDEINLLLKEKANDVHILSIDRGERHLAYYTLVDGKGNIIKQDTFNIIGNDRMKTNYHDKLAAIEKDRDSARKDWKKINNIKEMKEGYLSQVVHEIAKLVIEYNAIVVFEDLNFGFKRGRFKVEKQVYQKLEKMLIEKLNYLVFKDNEFDKTGGVLRAYQLTAPFETFKKMGKQTGIIYYVPAGFTSKICPVTGFVNQLYPKYESVSKSQEFFSKFDKICYNLDKGYFEFSFDYKNFGDKAAKGKWTIASFGSRLINFRNSDKNHNWDTREVYPTKELEKLLKDYSIEYGHGECIKAAICGESDKKFFAKLTSVLNTILQMRNSKTGTELDYLISPVADVNGNFFDSRQAPKNMPQDADANGAYHIGLKGLMLLGRIKNNQEGKKLNLVIKNEEYFEFVQNRNN

SEQ ID NO: 104 - protein, 1300 aa, Francisella novicida
  MISC_FEATURE (1)..(1300): Cpf1 D917A polypeptide sequence
MSIYQEFVNKYSLSKTLRFELIPQGKTLENIKARGLILDDEKRAKDYKKAKQIIDKYHQFFIEEILSSVCISEDLLQNYSDVYFKLKKSDDDNLQKDFKSAKDTIKKQISEYIKDSEKFKNLFNQNLIDAKKGQESDLILWLKQSKDNGIELFKANSDITDIDEALEIIKSFKGWTTYFKGFHENRKNVYSSNDIPTSIIYRIVDDNLPKFLENKAKYESLKDKAPEAINYEQIKKDLAEELTFDIDYKTSEVNQRVFSLDEVFEIANFNNYLNQSGITKFNTIIGGKFVNGENTKRKGINEYINLYSQQINDKTLKKYKMSVLFKQILSDTESKSFVIDKLEDDSDVVTTMQSFYEQIAAFKTVEEKSIKETLSLLFDDLKAQKLDLSKIYFKNDKSLTDLSQQVFDDYSVIGTAVLEYITQQIAPKNLDNPSKKEQELIAKKTEKAKYLSLETIKLALEEFNKHRDIDKQCRFEEILANFAAIPMIFDEIAQNKDNLAQISIKYQNQGKKDLLQASAEDDVKAIKDLLDQTNNLLHKLKIFHISQSEDKANILDKDEHFYLVFEECYFELANIVPLYNKIRNYITQKPYSDEKFKLNFENSTLANGWDKNKEPDNTAILFIKDDKYYLGVMNKKNNKIFDDKAIKENKGEGYKKIVYKLLPGANKMLPKVFFSAKSIKFYNPSEDILRIRNHSTHTKNGSPQKGYEKFEFNIEDCRKFIDFYKQSISKHPEWKDFGFRFSDTQRYNSIDEFYREVENQGYKLTFENISESYIDSVVNQGKLYLFQIYNKDFSAYSKGRPNLHTLYWKALFDERNLQDVVYKLNGEAELFYRKQSIPKKITHPAKEAIANKNKDNPKKESVFEYDLIKDKRFTEDKFFFHCPITINFKSSGANKFNDEINLLLKEKANDVHILSIARGERHLAYYTLVDGKGNIIKQDTFNIIGNDRMKTNYHDKLAAIEKDRDSARKDWKKINNIKEMKEGYLSQVVHEIAKLVIEYNAIVVFEDLNFGFKRGRFKVEKQVYQKLEKMLIEKLNYLVFKDNEFDKTGGVLRAYQLTAPFETFKKMGKQTGIIYYVPAGFTSKICPVTGFVNQLYPKYESVSKSQEFFSKFDKICYNLDKGYFEFSFDYKNFGDKAAKGKWTIASFGSRLINFRNSDKNHNWDTREVYPTKELEKLLKDYSIEYGHGECIKAAICGESDKKFFAKLTSVLNTILQMRNSKTGTELDYLISPVADVNGNFFDSRQAPKNMPQDADANGAYHIGLKGLMLLGRIKNNQEGKKLNLVIKNEEYFEFVQNRNN

SEQ ID NO: 105 - protein, 1300 aa, Francisella novicida
  MISC_FEATURE (1)..(1300): Cpf1 E1006A polypeptide sequence
MSIYQEFVNKYSLSKTLRFELIPQGKTLENIKARGLILDDEKRAKDYKKAKQIIDKYHQFFIEEILSSVCISEDLLQNYSDVYFKLKKSDDDNLQKDFKSAKDTIKKQISEYIKDSEKFKNLFNQNLIDAKKGQESDLILWLKQSKDNGIELFKANSDITDIDEALEIIKSFKGWTTYFKGFHENRKNVYSSNDIPTSIIYRIVDDNLPKFLENKAKYESLKDKAPEAINYEQIKKDLAEELTFDIDYKTSEVNQRVFSLDEVFEIANFNNYLNQSGITKFNTIIGGKFVNGENTKRKGINEYINLYSQQINDKTLKKYKMSVLFKQILSDTESKSFVIDKLEDDSDVVTTMQSFYEQIAAFKTVEEKSIKETLSLLFDDLKAQKLDLSKIYFKNDKSLTDLSQQVFDDYSVIGTAVLEYITQQIAPKNLDNPSKKEQELIAKKTEKAKYLSLETIKLALEEFNKHRDIDKQCRFEEILANFAAIPMIFDEIAQNKDNLAQISIKYQNQGKKDLLQASAEDDVKAIKDLLDQTNNLLHKLKIFHISQSEDKANILDKDEHFYLVFEECYFELANIVPLYNKIRNYITQKPYSDEKFKLNFENSTLANGWDKNKEPDNTAILFIKDDKYYLGVMNKKNNKIFDDKAIKENKGEGYKKIVYKLLPGANKMLPKVFFSAKSIKFYNPSEDILRIRNHSTHTKNGSPQKGYEKFEFNIEDCRKFIDFYKQSISKHPEWKDFGFRFSDTQRYNSIDEFYREVENQGYKLTFENISESYIDSVVNQGKLYLFQIYNKDFSAYSKGRPNLHTLYWKALFDERNLQDVVYKLNGEAELFYRKQSIPKKITHPAKEAIANKNKDNPKKESVFEYDLIKDKRFTEDKFFFHCPITINFKSSGANKFNDEINLLLKEKANDVHILSIDRGERHLAYYTLVDGKGNIIKQDTFNIIGNDRMKTNYHDKLAAIEKDRDSARKDWKKINNIKEMKEGYLSQVVHEIAKLVIEYNAIVVFADLNFGFKRGRFKVEKQVYQKLEKMLIEKLNYLVFKDNEFDKTGGVLRAYQLTAPFETFKKMGKQTGIIYYVPAGFTSKICPVTGFVNQLYPKYESVSKSQEFFSKFDKICYNLDKGYFEFSFDYKNFGDKAAKGKWTIASFGSRLINFRNSDKNHNWDTREVYPTKELEKLLKDYSIEYGHGECIKAAICGESDKKFFAKLTSVLNTILQMRNSKTGTELDYLISPVADVNGNFFDSRQAPKNMPQDADANGAYHIGLKGLMLLGRIKNNQEGKKLNLVIKNEEYFEFVQNRNN

SEQ ID NO: 106 - protein, 1300 aa, Francisella novicida
  MISC_FEATURE (1)..(1300): Cpf1 D1255A polypeptide sequence
MSIYQEFVNKYSLSKTLRFELIPQGKTLENIKARGLILDDEKRAKDYKKAKQIIDKYHQFFIEEILSSVCISEDLLQNYSDVYFKLKKSDDDNLQKDFKSAKDTIKKQISEYIKDSEKFKNLFNQNLIDAKKGQESDLILWLKQSKDNGIELFKANSDITDIDEALEIIKSFKGWTTYFKGFHENRKNVYSSNDIPTSIIYRIVDDNLPKFLENKAKYESLKDKAPEAINYEQIKKDLAEELTFDIDYKTSEVNQRVFSLDEVFEIANFNNYLNQSGITKFNTIIGGKFVNGENTKRKGINEYINLYSQQINDKTLKKYKMSVLFKQILSDTESKSFVIDKLEDDSDVVTTMQSFYEQIAAFKTVEEKSIKETLSLLFDDLKAQKLDLSKIYFKNDKSLTDLSQQVFDDYSVIGTAVLEYITQQIAPKNLDNPSKKEQELIAKKTEKAKYLSLETIKLALEEFNKHRDIDKQCRFEEILANFAAIPMIFDEIAQNKDNLAQISIKYQNQGKKDLLQASAEDDVKAIKDLLDQTNNLLHKLKIFHISQSEDKANILDKDEHFYLVFEECYFELANIVPLYNKIRNYITQKPYSDEKFKLNFENSTLANGWDKNKEPDNTAILFIKDDKYYLGVMNKKNNKIFDDKAIKENKGEGYKKIVYKLLPGANKMLPKVFFSAKSIKFYNPSEDILRIRNHSTHTKNGSPQKGYEKFEFNIEDCRKFIDFYKQSISKHPEWKDFGFRFSDTQRYNSIDEFYREVENQGYKLTFENISESYIDSVVNQGKLYLFQIYNKDFSAYSKGRPNLHTLYWKALFDERNLQDVVYKLNGEAELFYRKQSIPKKITHPAKEAIANKNKDNPKKESVFEYDLIKDKRFTEDKFFFHCPITINFKSSGANKFNDEINLLLKEKANDVHILSIDRGERHLAYYTLVDGKGNIIKQDTFNIIGNDRMKTNYHDKLAAIEKDRDSARKDWKKINNIKEMKEGYLSQVVHEIAKLVIEYNAIVVFEDLNFGFKRGRFKVEKQVYQKLEKMLIEKLNYLVFKDNEFDKTGGVLRAYQLTAPFETFKKMGKQTGIIYYVPAGFTSKICPVTGFVNQLYPKYESVSKSQEFFSKFDKICYNLDKGYFEFSFDYKNFGDKAAKGKWTIASFGSRLINFRNSDKNHNWDTREVYPTKELEKLLKDYSIEYGHGECIKAAICGESDKKFFAKLTSVLNTILQMRNSKTGTELDYLISPVADVNGNFFDSRQAPKNMPQDAAANGAYHIGLKGLMLLGRIKNNQEGKKLNLVIKNEEYFEFVQNRNN

SEQ ID NO: 107 - protein, 1300 aa, Francisella novicida
  MISC_FEATURE (1)..(1300): Cpf1 D917A/E1006A polypeptide sequence
MSIYQEFVNKYSLSKTLRFELIPQGKTLENIKARGLILDDEKRAKDYKKAKQIIDKYHQFFIEEILSSVCISEDLLQNYSDVYFKLKKSDDDNLQKDFKSAKDTIKKQISEYIKDSEKFKNLFNQNLIDAKKGQESDLILWLKQSKDNGIELFKANSDITDIDEALEIIKSFKGWTTYFKGFHENRKNVYSSNDIPTSIIYRIVDDNLPKFLENKAKYESLKDKAPEAINYEQIKKDLAEELTFDIDYKTSEVNQRVFSLDEVFEIANFNNYLNQSGITKFNTIIGGKFVNGENTKRKGINEYINLYSQQINDKTLKKYKMSVLFKQILSDTESKSFVIDKLEDDSDVVTTMQSFYEQIAAFKTVEEKSIKETLSLLFDDLKAQKLDLSKIYFKNDKSLTDLSQQVFDDYSVIGTAVLEYITQQIAPKNLDNPSKKEQELIAKKTEKAKYLSLETIKLALEEFNKHRDIDKQCRFEEILANFAAIPMIFDEIAQNKDNLAQISIKYQNQGKKDLLQASAEDDVKAIKDLLDQTNNLLHKLKIFHISQSEDKANILDKDEHFYLVFEECYFELANIVPLYNKIRNYITQKPYSDEKFKLNFENSTLANGWDKNKEPDNTAILFIKDDKYYLGVMNKKNNKIFDDKAIKENKGEGYKKIVYKLLPGANKMLPKVFFSAKSIKFYNPSEDILRIRNHSTHTKNGSPQKGYEKFEFNIEDCRKFIDFYKQSISKHPEWKDFGFRFSDTQRYNSIDEFYREVENQGYKLTFENISESYIDSVVNQGKLYLFQIYNKDFSAYSKGRPNLHTLYWKALFDERNLQDVVYKLNGEAELFYRKQSIPKKITHPAKEAIANKNKDNPKKESVFEYDLIKDKRFTEDKFFFHCPITINFKSSGANKFNDEINLLLKEKANDVHILSIARGERHLAYYTLVDGKGNIIKQDTFNIIGNDRMKTNYHDKLAAIEKDRDSARKDWKKINNIKEMKEGYLSQVVHEIAKLVIEYNAIVVFADLNFGFKRGRFKVEKQVYQKLEKMLIEKLNYLVFKDNEFDKTGGVLRAYQLTAPFETFKKMGKQTGIIYYVPAGFTSKICPVTGFVNQLYPKYESVSKSQEFFSKFDKICYNLDKGYFEFSFDYKNFGDKAAKGKWTIASFGSRLINFRNSDKNHNWDTREVYPTKELEKLLKDYSIEYGHGECIKAAICGESDKKFFAKLTSVLNTILQMRNSKTGTELDYLISPVADVNGNFFDSRQAPKNMPQDADANGAYHIGLKGLMLLGRIKNNQEGKKLNLVIKNEEYFEFVQNRNN

SEQ ID NO: 108 - protein, 1300 aa, Francisella novicida
  MISC_FEATURE (1)..(1300): Cpf1 D917A/D1255A polypeptide sequence
MSIYQEFVNKYSLSKTLRFELIPQGKTLENIKARGLILDDEKRAKDYKKAKQIIDKYHQFFIEEILSSVCISEDLLQNYSDVYFKLKKSDDDNLQKDFKSAKDTIKKQISEYIKDSEKFKNLFNQNLIDAKKGQESDLILWLKQSKDNGIELFKANSDITDIDEALEIIKSFKGWTTYFKGFHENRKNVYSSNDIPTSIIYRIVDDNLPKFLENKAKYESLKDKAPEAINYEQIKKDLAEELTFDIDYKTSEVNQRVFSLDEVFEIANFNNYLNQSGITKFNTIIGGKFVNGENTKRKGINEYINLYSQQINDKTLKKYKMSVLFKQILSDTESKSFVIDKLEDDSDVVTTMQSFYEQIAAFKTVEEKSIKETLSLLFDDLKAQKLDLSKIYFKNDKSLTDLSQQVFDDYSVIGTAVLEYITQQIAPKNLDNPSKKEQELIAKKTEKAKYLSLETIKLALEEFNKHRDIDKQCRFEEILANFAAIPMIFDEIAQNKDNLAQISIKYQNQGKKDLLQASAEDDVKAIKDLLDQTNNLLHKLKIFHISQSEDKANILDKDEHFYLVFEECYFELANIVPLYNKIRNYITQKPYSDEKFKLNFENSTLANGWDKNKEPDNTAILFIKDDKYYLGVMNKKNNKIFDDKAIKENKGEGYKKIVYKLLPGANKMLPKVFFSAKSIKFYNPSEDILRIRNHSTHTKNGSPQKGYEKFEFNIEDCRKFIDFYKQSISKHPEWKDFGFRFSDTQRYNSIDEFYREVENQGYKLTFENISESYIDSVVNQGKLYLFQIYNKDFSAYSKGRPNLHTLYWKALFDERNLQDVVYKLNGEAELFYRKQSIPKKITHPAKEAIANKNKDNPKKESVFEYDLIKDKRFTEDKFFFHCPITINFKSSGANKFNDEINLLLKEKANDVHILSIARGERHLAYYTLVDGKGNIIKQDTFNIIGNDRMKTNYHDKLAAIEKDRDSARKDWKKINNIKEMKEGYLSQVVHEIAKLVIEYNAIVVFEDLNFGFKRGRFKVEKQVYQKLEKMLIEKLNYLVFKDNEFDKTGGVLRAYQLTAPFETFKKMGKQTGIIYYVPAGFTSKICPVTGFVNQLYPKYESVSKSQEFFSKFDKICYNLDKGYFEFSFDYKNFGDKAAKGKWTIASFGSRLINFRNSDKNHNWDTREVYPTKELEKLLKDYSIEYGHGECIKAAICGESDKKFFAKLTSVLNTILQMRNSKTGTELDYLISPVADVNGNFFDSRQAPKNMPQDAAANGAYHIGLKGLMLLGRIKNNQEGKKLNLVIKNEEYFEFVQNRNN

SEQ ID NO: 109 - protein, 1300 aa, Francisella novicida
  MISC_FEATURE (1)..(1300): Cpf1 E1006A/D1255A polypeptide sequence
MSIYQEFVNKYSLSKTLRFELIPQGKTLENIKARGLILDDEKRAKDYKKAKQIIDKYHQFFIEEILSSVCISEDLLQNYSDVYFKLKKSDDDNLQKDFKSAKDTIKKQISEYIKDSEKFKNLFNQNLIDAKKGQESDLILWLKQSKDNGIELFKANSDITDIDEALEIIKSFKGWTTYFKGFHENRKNVYSSNDIPTSIIYRIVDDNLPKFLENKAKYESLKDKAPEAINYEQIKKDLAEELTFDIDYKTSEVNQRVFSLDEVFEIANFNNYLNQSGITKFNTIIGGKFVNGENTKRKGINEYINLYSQQINDKTLKKYKMSVLFKQILSDTESKSFVIDKLEDDSDVVTTMQSFYEQIAAFKTVEEKSIKETLSLLFDDLKAQKLDLSKIYFKNDKSLTDLSQQVFDDYSVIGTAVLEYITQQIAPKNLDNPSKKEQELIAKKTEKAKYLSLETIKLALEEFNKHRDIDKQCRFEEILANFAAIPMIFDEIAQNKDNLAQISIKYQNQGKKDLLQASAEDDVKAIKDLLDQTNNLLHKLKIFHISQSEDKANILDKDEHFYLVFEECYFELANIVPLYNKIRNYITQKPYSDEKFKLNFENSTLANGWDKNKEPDNTAILFIKDDKYYLGVMNKKNNKIFDDKAIKENKGEGYKKIVYKLLPGANKMLPKVFFSAKSIKFYNPSEDILRIRNHSTHTKNGSPQKGYEKFEFNIEDCRKFIDFYKQSISKHPEWKDFGFRFSDTQRYNSIDEFYREVENQGYKLTFENISESYIDSVVNQGKLYLFQIYNKDFSAYSKGRPNLHTLYWKALFDERNLQDVVYKLNGEAELFYRKQSIPKKITHPAKEAIANKNKDNPKKESVFEYDLIKDKRFTEDKFFFHCPITINFKSSGANKFNDEINLLLKEKANDVHILSIDRGERHLAYYTLVDGKGNIIKQDTFNIIGNDRMKTNYHDKLAAIEKDRDSARKDWKKINNIKEMKEGYLSQVVHEIAKLVIEYNAIVVFADLNFGFKRGRFKVEKQVYQKLEKMLIEKLNYLVFKDNEFDKTGGVLRAYQLTAPFETFKKMGKQTGIIYYVPAGFTSKICPVTGFVNQLYPKYESVSKSQEFFSKFDKICYNLDKGYFEFSFDYKNFGDKAAKGKWTIASFGSRLINFRNSDKNHNWDTREVYPTKELEKLLKDYSIEYGHGECIKAAICGESDKKFFAKLTSVLNTILQMRNSKTGTELDYLISPVADVNGNFFDSRQAPKNMPQDAAANGAYHIGLKGLMLLGRIKNNQEGKKLNLVIKNEEYFEFVQNRNN

SEQ ID NO: 110 - protein, 1300 aa, Francisella novicida
  MISC_FEATURE (1)..(1300): Cpf1 D917A/E1006A/D1255A polypeptide sequence
MSIYQEFVNKYSLSKTLRFELIPQGKTLENIKARGLILDDEKRAKDYKKAKQIIDKYHQFFIEEILSSVCISEDLLQNYSDVYFKLKKSDDDNLQKDFKSAKDTIKKQISEYIKDSEKFKNLFNQNLIDAKKGQESDLILWLKQSKDNGIELFKANSDITDIDEALEIIKSFKGWTTYFKGFHENRKNVYSSNDIPTSIIYRIVDDNLPKFLENKAKYESLKDKAPEAINYEQIKKDLAEELTFDIDYKTSEVNQRVFSLDEVFEIANFNNYLNQSGITKFNTIIGGKFVNGENTKRKGINEYINLYSQQINDKTLKKYKMSVLFKQILSDTESKSFVIDKLEDDSDVVTTMQSFYEQIAAFKTVEEKSIKETLSLLFDDLKAQKLDLSKIYFKNDKSLTDLSQQVFDDYSVIGTAVLEYITQQIAPKNLDNPSKKEQELIAKKTEKAKYLSLETIKLALEEFNKHRDIDKQCRFEEILANFAAIPMIFDEIAQNKDNLAQISIKYQNQGKKDLLQASAEDDVKAIKDLLDQTNNLLHKLKIFHISQSEDKANILDKDEHFYLVFEECYFELANIVPLYNKIRNYITQKPYSDEKFKLNFENSTLANGWDKNKEPDNTAILFIKDDKYYLGVMNKKNNKIFDDKAIKENKGEGYKKIVYKLLPGANKMLPKVFFSAKSIKFYNPSEDILRIRNHSTHTKNGSPQKGYEKFEFNIEDCRKFIDFYKQSISKHPEWKDFGFRFSDTQRYNSIDEFYREVENQGYKLTFENISESYIDSVVNQGKLYLFQIYNKDFSAYSKGRPNLHTLYWKALFDERNLQDVVYKLNGEAELFYRKQSIPKKITHPAKEAIANKNKDNPKKESVFEYDLIKDKRFTEDKFFFHCPITINFKSSGANKFNDEINLLLKEKANDVHILSIARGERHLAYYTLVDGKGNIIKQDTFNIIGNDRMKTNYHDKLAAIEKDRDSARKDWKKINNIKEMKEGYLSQVVHEIAKLVIEYNAIVVFADLNFGFKRGRFKVEKQVYQKLEKMLIEKLNYLVFKDNEFDKTGGVLRAYQLTAPFETFKKMGKQTGIIYYVPAGFTSKICPVTGFVNQLYPKYESVSKSQEFFSKFDKICYNLDKGYFEFSFDYKNFGDKAAKGKWTIASFGSRLINFRNSDKNHNWDTREVYPTKELEKLLKDYSIEYGHGECIKAAICGESDKKFFAKLTSVLNTILQMRNSKTGTELDYLISPVADVNGNFFDSRQAPKNMPQDAAANGAYHIGLKGLMLLGRIKNNQEGKKLNLVIKNEEYFEFVQNRNN

SEQ ID NO: 111 - protein, 1052 aa, Staphylococcus aureus
  MISC_FEATURE (1)..(1052): Exemplary SaCas9 polypeptide sequence
KRNYILGLDIGITSVGYGIIDYETRDVIDAGVRLFKEANVENNEGRRSKRGARRLKRRRRHRIQRVKKLLFDYNLLTDHSELSGINPYEARVKGLSQKLSEEEFSAALLHLAKRRGVHNVNEVEEDTGNELSTKEQISRNSKALEEKYVAELQLERLKKDGEVRGSINRFKTSDYVKEAKQLLKVQKAYHQLDQSFIDTYIDLLETRRTYYEGPGEGSPFGWKDIKEWYEMLMGHCTYFPEELRSVKYAYNADLYNALNDLNNLVITRDENEKLEYYEKFQIIENVFKQKKKPTLKQIAKEILVNEEDIKGYRVTSTGKPEFTNLKVYHDIKDITARKEIIENAELLDQIAKILTIYQSSEDIQEELTNLNSELTQEEIEQISNLKGYTGTHNLSLKAINLILDELWHTNDNQIAIFNRLKLVPKKVDLSQQKEIPTTLVDDFILSPVVKRSFIQSIKVINAIIKKYGLPNDIIIELAREKNSKDAQKMINEMQKRNRQTNERIEEIIRTTGKENAKYLIEKIKLHDMQEGKCLYSLEAIPLEDLLNNPFNYEVDHIIPRSVSFDNSFNNKVLVKQEENSKKGNRTPFQYLSSSDSKISYETFKKHILNLAKGKGRISKTKKEYLLEERDINRFSVQKDFINRNLVDTRYATRGLMNLLRSYFRVNNLDVKVKSINGGFTSFLRRKWKFKKERNKGYKHHAEDALIIANADFIFKEWKKLDKAKKVMENQMFEEKQAESMPEIETEQEYKEIFITPHQIKHIKDFKDYKYSHRVDKKPNRELINDTLYSTRKDDKGNTLIVNNLNGLYDKDNDKLKKLINKSPEKLLMYHHDPQTYQKLKLIMEQYGDEKNPLYKYYEETGNYLTKYSKKDNGPVIKKIKYYGNKLNAHLDITDDYPNSRNKVVKLSLKPYRFDVYLDNGVYKFVTVKNLDVIKKENYYEVNSKCYEEAKKLKKISNQAEFIASFYNNDLIKINGELYRVIGVNNDLLNRIEVNMIDITYREYLENMNDKRPPRIIKTIASKTQSIKKYSTDILGNLYEVKSKKHPQIIKKG

SEQ ID NO: 112 - protein, 1052 aa, Staphylococcus aureus
  MISC_FEATURE (1)..(1052): SaCas9n polypeptide sequence
KRNYILGLDIGITSVGYGIIDYETRDVIDAGVRLFKEANVENNEGRRSKRGARRLKRRRRHRIQRVKKLLFDYNLLTDHSELSGINPYEARVKGLSQKLSEEEFSAALLHLAKRRGVHNVNEVEEDTGNELSTKEQISRNSKALEEKYVAELQLERLKKDGEVRGSINRFKTSDYVKEAKQLLKVQKAYHQLDQSFIDTYIDLLETRRTYYEGPGEGSPFGWKDIKEWYEMLMGHCTYFPEELRSVKYAYNADLYNALNDLNNLVITRDENEKLEYYEKFQIIENVFKQKKKPTLKQIAKEILVNEEDIKGYRVTSTGKPEFTNLKVYHDIKDITARKEIIENAELLDQIAKILTIYQSSEDIQEELTNLNSELTQEEIEQISNLKGYTGTHNLSLKAINLILDELWHTNDNQIAIFNRLKLVPKKVDLSQQKEIPTTLVDDFILSPVVKRSFIQSIKVINAIIKKYGLPNDIIIELAREKNSKDAQKMINEMQKRNRQTNERIEEIIRTTGKENAKYLIEKIKLHDMQEGKCLYSLEAIPLEDLLNNPFNYEVDHIIPRSVSFDNSFNNKVLVKQEEASKKGNRTPFQYLSSSDSKISYETFKKHILNLAKGKGRISKTKKEYLLEERDINRFSVQKDFINRNLVDTRYATRGLMNLLRSYFRVNNLDVKVKSINGGFTSFLRRKWKFKKERNKGYKHHAEDALIIANADFIFKEWKKLDKAKKVMENQMFEEKQAESMPEIETEQEYKEIFITPHQIKHIKDFKDYKYSHRVDKKPNRELINDTLYSTRKDDKGNTLIVNNLNGLYDKDNDKLKKLINKSPEKLLMYHHDPQTYQKLKLIMEQYGDEKNPLYKYYEETGNYLTKYSKKDNGPVIKKIKYYGNKLNAHLDITDDYPNSRNKVVKLSLKPYRFDVYLDNGVYKFVTVKNLDVIKKENYYEVNSKCYEEAKKLKKISNQAEFIASFYNNDLIKINGELYRVIGVNNDLLNRIEVNMIDITYREYLENMNDKRPPRIIKTIASKTQSIKKYSTDILGNLYEVKSKKHPQIIKKG

SEQ ID NO: 113 - protein, 1052 aa, Staphylococcus aureus
  MISC_FEATURE (1)..(1052): SaKKH Cas9 polypeptide sequence
KRNYILGLDIGITSVGYGIIDYETRDVIDAGVRLFKEANVENNEGRRSKRGARRLKRRRRHRIQRVKKLLFDYNLLTDHSELSGINPYEARVKGLSQKLSEEEFSAALLHLAKRRGVHNVNEVEEDTGNELSTKEQISRNSKALEEKYVAELQLERLKKDGEVRGSINRFKTSDYVKEAKQLLKVQKAYHQLDQSFIDTYIDLLETRRTYYEGPGEGSPFGWKDIKEWYEMLMGHCTYFPEELRSVKYAYNADLYNALNDLNNLVITRDENEKLEYYEKFQIIENVFKQKKKPTLKQIAKEILVNEEDIKGYRVTSTGKPEFTNLKVYHDIKDITARKEIIENAELLDQIAKILTIYQSSEDIQEELTNLNSELTQEEIEQISNLKGYTGTHNLSLKAINLILDELWHTNDNQIAIFNRLKLVPKKVDLSQQKEIPTTLVDDFILSPVVKRSFIQSIKVINAIIKKYGLPNDIIIELAREKNSKDAQKMINEMQKRNRQTNERIEEIIRTTGKENAKYLIEKIKLHDMQEGKCLYSLEAIPLEDLLNNPFNYEVDHIIPRSVSFDNSFNNKVLVKQEEASKKGNRTPFQYLSSSDSKISYETFKKHILNLAKGKGRISKTKKEYLLEERDINRFSVQKDFINRNLVDTRYATRGLMNLLRSYFRVNNLDVKVKSINGGFTSFLRRKWKFKKERNKGYKHHAEDALIIANADFIFKEWKKLDKAKKVMENQMFEEKQAESMPEIETEQEYKEIFITPHQIKHIKDFKDYKYSHRVDKKPNRKLINDTLYSTRKDDKGNTLIVNNLNGLYDKDNDKLKKLINKSPEKLLMYHHDPQTYQKLKLIMEQYGDEKNPLYKYYEETGNYLTKYSKKDNGPVIKKIKYYGNKLNAHLDITDDYPNSRNKVVKLSLKPYRFDVYLDNGVYKFVTVKNLDVIKKENYYEVNSKCYEEAKKLKKISNQAEFIASFYKNDLIKINGELYRVIGVNNDLLNRIEVNMIDITYREYLENMNDKRPPHIIKTIASKTQSIKKYSTDILGNLYEVKSKKHPQIIKKG

SEQ ID NO: 114 - protein, 707 aa, Artificial Sequence
  Description of artificial sequence: Casphi-1 polypeptide sequence
MADTPTLFTQFLRHHLPGQRFRKDILKQAGRILANKGEDATIAFLRGKSEESPPDFQPPVKCPIIACSRPLTEWPIYQASVAIQGYVYGQSLAEFEASDPGCSKDGLLGWFDKTGVCTDYFSVQGLNLIFQNARKRYIGVQTKVTNRNEKRHKKLKRINAKRIAEGLPELTSDEPESALDETGHLIDPPGLNTNIYCYQQVSPKPLALSEVNQLPTAYAGYSTSGDDPIQPMVTKDRLSISKGQPGYIPEHQRALLSQKKHRRMRGYGLKARALLVIVRIQDDWAVIDLRSLLRNAYWRRIVQTKEPSTITKLLKLVTGDPVLDATRMVATFTYKPGIVQVRSAKCLKNKQGSKLFSERYLNETVSVTSIDLGSNNLVAVATYRLVNGNTPELLQRFTLPSHLVKDFERYKQAHDTLEDSIQKTAVASLPQGQQTEIRMWSMYGFREAQERVCQELGLADGSIPWNVMTATSTILTDLFLARGGDPKKCMFTSEPKKKKNSKQVLYKIRDRAWAKMYRTLLSKETREAWNKALWGLKRGSPDYARLSKRKEELARRCVNYTISTAEKRAQCGRTIVALEDLNIGFFHGRGKQEPGWVGLFTRKKENRWLMQALHKAFLELAHHRGYHVIEVNPAYTSQTCPVCRHCDPDNRDQHNREAFHCIGCGFRGNADLDVATHNIAMVAITGESLKRARGSVASKTPQPLAAE

SEQ ID NO: 115 - protein, 757 aa, Artificial Sequence
  Description of artificial sequence: Casphi-2 polypeptide sequence
MPKPAVESEFSKVLKKHFPGERFRSSYMKRGGKILAAQGEEAVVAYLQGKSEEEPPNFQPPAKCHVVTKSRDFAEWPIMKASEAIQRYIYALSTTERAACKPGKSSESHAAWFAATGVSNHGYSHVQGLNLIFDHTLGRYDGVLKKVQLRNEKARARLESINASRADEGLPEIKAEEEEVATNETGHLLQPPGINPSFYVYQTISPQAYRPRDEIVLPPEYAGYVRDPNAPIPLGVVRNRCDIQKGCPGYIPEWQREAGTAISPKTGKAVTVPGLSPKKNKRMRRYWRSEKEKAQDALLVTVRIGTDWVVIDVRGLLRNARWRTIAPKDISLNALLDLFTGDPVIDVRRNIVTFTYTLDACGTYARKWTLKGKQTKATLDKLTATQTVALVAIDLGQTNPISAGISRVTQENGALQCEPLDRFTLPDDLLKDISAYRIAWDRNEEELRARSVEALPEAQQAEVRALDGVSKETARTQLCADFGLDPKRLPWDKMSSNTTFISEALLSNSVSRDQVFFTPAPKKGAKKKAPVEVMRKDRTWARAYKPRLSVEAQKLKNEALWALKRTSPEYLKLSRRKEELCRRSINYVIEKTRRRTQCQIVIPVIEDLNVRFFHGSGKRLPGWDNFFTAKKENRWFIQGLHKAFSDLRTHRSFYVFEVRPERTSITCPKCGHCEVGNRDGEAFQCLSCGKTCNADLDVATHNLTQVALTGKTMPKREEPRDAQGTAPARKTKKASKSKAPPAEREDQTPAQEPSQTS

SEQ ID NO: 116 - protein, 766 aa, Artificial Sequence
  Description of artificial sequence: Casphi-3 polypeptide sequence
MEKEITELTKIRREFPNKKFSSTDMKKAGKLLKAEGPDAVRDFLNSCQEIIGDFKPPVKTNIVSISRPFEEWPVSMVGRAIQEYYFSLTKEELESVHPGTSSEDHKSFFNITGLSNYNYTSVQGLNLIFKNAKAIYDGTLVKANNKNKKLEKKFNEINHKRSLEGLPIITPDFEEPFDENGHLNNPPGINRNIYGYQGCAAKVFVPSKHKMVSLPKEYEGYNRDPNLSLAGFRNRLEIPEGEPGHVPWFQRMDIPEGQIGHVNKIQRFNFVHGKNSGKVKFSDKTGRVKRYHHSKYKDATKPYKFLEESKKVSALDSILAIITIGDDWVVFDIRGLYRNVFYRELAQKGLTAVQLLDLFTGDPVIDPKKGVVTFSYKEGVVPVFSQKIVPRFKSRDTLEKLTSQGPVALLSVDLGQNEPVAARVCSLKNINDKITLDNSCRISFLDDYKKQIKDYRDSLDELEIKIRLEAINSLETNQQVEIRDLDVFSADRAKANTVDMFDIDPNLISWDSMSDARVSTQISDLYLKNGGDESRVYFEINNKRIKRSDYNISQLVRPKLSDSTRKNLNDSIWKLKRTSEEYLKLSKRKLELSRAVVNYTIRQSKLLSGINDIVIILEDLDVKKKFNGRGIRDIGWDNFFSSRKENRWFIPAFHKAFSELSSNRGLCVIEVNPAWTSATCPDCGFCSKENRDGINFTCRKCGVSYHADIDVATLNIARVAVLGKPMSGPADRERLGDTKKPRVARSRKTMKRKDISNSTVEAMVTA

SEQ ID NO: 117 - protein, 765 aa, Artificial Sequence
  Description of artificial sequence: Casphi-4 polypeptide sequence
MYSLEMADLKSEPSLLAKLLRDRFPGKYWLPKYWKLAEKKRLTGGEEAACEYMADKQLDSPPPNFRPPARCVILAKSRPFEDWPVHRVASKAQSFVIGLSEQGFAALRAAPPSTADARRDWLRSHGASEDDLMALEAQLLETIMGNAISLHGGVLKKIDNANVKAAKRLSGRNEARLNKGLQELPPEQEGSAYGADGLLVNPPGLNLNIYCRKSCCPKPVKNTARFVGHYPGYLRDSDSILISGTMDRLTIIEGMPGHIPAWQREQGLVKPGGRRRRLSGSESNMRQKVDPSTGPRRSTRSGTVNRSNQRTGRNGDPLLVEIRMKEDWVLLDARGLLRNLRWRESKRGLSCDHEDLSLSGLLALFSGDPVIDPVRNEVVFLYGEGIIPVRSTKPVGTRQSKKLLERQASMGPLTLISCDLGQTNLIAGRASAISLTHGSLGVRSSVRIELDPEIIKSFERLRKDADRLETEILTAAKETLSDEQRGEVNSHEKDSPQTAKASLCRELGLHPPSLPWGQMGPSTTFIADMLISHGRDDDAFLSHGEFPTLEKRKKFDKRFCLESRPLLSSETRKALNESLWEVKRTSSEYARLSQRKKEMARRAVNFVVEISRRKTGLSNVIVNIEDLNVRIFHGGGKQAPGWDGFFRPKSENRWFIQAIHKAFSDLAAHHGIPVIESDPQRTSMTCPECGHCDSKNRNGVRFLCKGCGASMDADFDAACRNLERVALTGKPMPKPSTSCERLLSATTGKVCSDHSLSHDAIEKAS

SEQ ID NO: 118 - protein, 793 aa, Artificial Sequence
  Description of artificial sequence: Casphi-5 polypeptide sequence
MSSLPTPLELLKQKHADLFKGLQFSSKDNKMAGKVLKKDGEEAALAFLSERGVSRGELPNFRPPAKTLVVAQSRPFEEFPIYRVSEAIQLYVYSLSVKELETVPSGSSTKKEHQRFFQDSSVPDFGYTSVQGLNKIFGLARGIYLGVITRGENQLQKAKSKHEALNKKRRASGEAETEFDPTPYEYMTPERKLAKPPGVNHSIMCYVDISVDEFDFRNPDGIVLPSEYAGYCREINTAIEKGTVDRLGHLKGGPGYIPGHQRKESTTEGPKINFRKGRIRRSYTALYAKRDSRRVRQGKLALPSYRHHMMRLNSNAESAILAVIFFGKDWVVFDLRGLLRNVRWRNLFVDGSTPSTLLGMFGDPVIDPKRGVVAFCYKEQIVPVVSKSITKMVKAPELLNKLYLKSEDPLVLVAIDLGQTNPVGVGVYRVMNASLDYEVVTRFALESELLREIESYRQRTNAFEAQIRAETFDAMTSEEQEEITRVRAFSASKAKENVCHRFGMPVDAVDWATMGSNTIHIAKWVMRHGDPSLVEVLEYRKDNEIKLDKNGVPKKVKLTDKRIANLTSIRLRFSQETSKHYNDTMWELRRKHPVYQKLSKSKADFSRRVVNSIIRRVNHLVPRARIVFIIEDLKNLGKVFHGSGKRELGWDSYFEPKSENRWFIQVLHKAFSETGKHKGYYIIECWPNWTSCTCPKCSCCDSENRHGEVFRCLACGYTCNTDFGTAPDNLVKIATTGKGLPGPKKRCKGSSKGKNPKIARSSETGVSVTESGAPKVKKSSPTQTSQSSSQSAP

SEQ ID NO: 119 - protein, 441 aa, Artificial Sequence
  Description of artificial sequence: Casphi-6 polypeptide sequence
MNKIEKEKTPLAKLMNENFAGLRFPFAIIKQAGKKLLKEGELKTIEYMTGKGSIEPLPNFKPPVKCLIVAKRRDLKYFPICKASCEIQSYVYSLNYKDFMDYFSTPMTSQKQHEEFFKKSGLNIEYQNVAGLNLIFNNVKNTYNGVILKVKNRNEKLKKKAIKNNYEFEEIKTFNDDGCLINKPGINNVIYCFQSISPKILKNITHLPKEYNDYDCSVDRNIIQKYVSRLDIPESQPGHVPEWQRKLPEFNNTNNPRRRRKWYSNGRNISKGYSVDQVNQAKIEDSLLAQIKIGEDWIILDIRGLLRDLNRRELISYKNKLTIKDVLGFFSDYPIIDIKKNLVTFCYKEGVIQVVSQKSIGNKKSKQLLEKLIENKPIALVSIDLGQTNPVSVKISKLNKINNKISIESFTYRFLNEEILKEIEKYRKDYDKLELKLINEA

SEQ ID NO: 120 - protein, 772 aa, Artificial Sequence
  Description of artificial sequence: Casphi-7 polypeptide sequence
MSNTAVSTREHMSNKTTPPSPLSLLLRAHFPGLKFESQDYKIAGKKLRDGGPEAVISYLTGKGQAKLKDVKPPAKAFVIAQSRPFIEWDLVRVSRQIQEKIFGIPATKGRPKQDGLSETAFNEAVASLEVDGKSKLNEETRAAFYEVLGLDAPSLHAQAQNALIKSAISIREGVLKKVENRNEKNLSKTKRRKEAGEEATFVEEKAHDERGYLIHPPGVNQTIPGYQAVVIKSCPSDFIGLPSGCLAKESAEALTDYLPHDRMTIPKGQPGYVPEWQHPLLNRRKNRRRRDWYSASLNKPKATCSKRSGTPNRKNSRTDQIQSGRFKGAIPVLMRFQDEWVIIDIRGLLRNARYRKLLKEKSTIPDLLSLFTGDPSIDMRQGVCTFIYKAGQACSAKMVKTKNAPEILSELTKSGPVVLVSIDLGQTNPIAAKVSRVTQLSDGQLSHETLLRELLSNDSSDGKEIARYRVASDRLRDKLANLAVERLSPEHKSEILRAKNDTPALCKARVCAALGLNPEMIAWDKMTPYTEFLATAYLEKGGDRKVATLKPKNRPEMLRRDIKFKGTEGVRIEVSPEAAEAYREAQWDLQRTSPEYLRLSTWKQELTKRILNQLRHKAAKSSQCEVVVMAFEDLNIKMMHGNGKWADGGWDAFFIKKRENRWFMQAFHKSLTELGAHKGVPTIEVTPHRTSITCTKCGHCDKANRDGERFACQKCGFVAHADLEIATDNIERVALTGKPMPKPESERSGDAKKSVGARKAAFKPEEDAEAAE

SEQ ID NO: 121 - protein, 717 aa, Artificial Sequence
  Description of artificial sequence: Casphi-8 polypeptide sequence
MIKPTVSQFLTPGFKLIRNHSRTAGLKLKNEGEEACKKFVRENEIPKDECPNFQGGPAIANIIAKSREFTEWEIYQSSLAIQEVIFTLPKDKLPEPILKEEWRAQWLSEHGLDTVPYKEAAGLNLIIKNAVNTYKGVQVKVDNKNKNNLAKINRKNEIAKLNGEQEISFEEIKAFDDKGYLLQKPSPNKSIYCYQSVSPKPFITSKYHNVNLPEEYIGYYRKSNEPIVSPYQFDRLRIPIGEPGYVPKWQYTFLSKKENKRRKLSKRIKNVSPILGIICIKKDWCVFDMRGLLRTNHWKKYHKPTDSINDLFDYFTGDPVIDTKANVVRFRYKMENGIVNYKPVREKKGKELLENICDQNGSCKLATVDVGQNNPVAIGLFELKKVNGELTKTLISRHPTPIDFCNKITAYRERYDKLESSIKLDAIKQLTSEQKIEVDNYNNNFTPQNTKQIVCSKLNINPNDLPWDKMISGTHFISEKAQVSNKSEIYFTSTDKGKTKDVMKSDYKWFQDYKPKLSKEVRDALSDIEWRLRRESLEFNKLSKSREQDARQLANWISSMCDVIGIENLVKKNNFFGGSGKREPGWDNFYKPKKENRWWINAIHKALTELSQNKGKRVILLPAMRTSITCPKCKYCDSKNRNGEKFNCLKCGIELNADIDVATENLATVAITAQSMPKPTCERSGDAKKPVRARKAKAPEFHDKLAPSYTVVLREAV

SEQ ID NO: 122 - protein, 793 aa, Artificial Sequence
  Description of artificial sequence: Casphi-9 polypeptide sequence
MRSSREIGDKILMRQPAEKTAFQVFRQEVIGTQKLSGGDAKTAGRLYKQGKMEAAREWLLKGARDDVPPNFQPPAKCLVVAVSHPFEEWDISKTNHDVQAYIYAQPLQAEGHLNGLSEKWEDTSADQHKLWFEKTGVPDRGLPVQAINKIAKAAVNRAFGVVRKVENRNEKRRSRDNRIAEHNRENGLTEVVREAPEVATNADGFLLHPPGIDPSILSYASVSPVPYNSSKHSFVRLPEEYQAYNVEPDAPIPQFVVEDRFAIPPGQPGYVPEWQRLKCSTNKHRRMRQWSNQDYKPKAGRRAKPLEFQAHLTRERAKGALLVVMRIKEDWVVFDVRGLLRNVEWRKVLSEEAREKLTLKGLLDLFTGDPVIDTKRGIVTFLYKAEITKILSKRTVKTKNARDLLLRLTEPGEDGLRREVGLVAVDLGQTHPIAAAIYRIGRTSAGALESTVLHRQGLREDQKEKLKEYRKRHTALDSRLRKEAFETLSVEQQKEIVTVSGSGAQITKDKVCNYLGVDPSTLPWEKMGSYTHFISDDFLRRGGDPNIVHFDRQPKKGKVSKKSQRIKRSDSQWVGRMRPRLSQETAKARMEADWAAQNENEEYKRLARSKQELARWCVNTLLQNTRCITQCDEIVVVIEDLNVKSLHGKGAREPGWDNFFTPKTENRWFIQILHKTFSELPKHRGEHVIEGCPLRTSITCPACSYCDKNSRNGEKFVCVACGATFHADFEVATYNLVRLATTGMPMPKSLERQGGGEKAGGARKARKKAKQVEKIVVQANANVTMNGASLHSP

SEQ ID NO: 123 - protein, 812 aa, Artificial Sequence
  Description of artificial sequence: Casphi-10 polypeptide sequence
MDMLDTETNYATETPAQQQDYSPKPPKKAQRAPKGFSKKARPEKKPPKPITLFTQKHFSGVRFLKRVIRDASKILKLSESRTITFLEQAIERDGSAPPDVTPPVHNTIMAVTRPFEEWPEVILSKALQKHCYALTKKIKIKTWPKKGPGKKCLAAWSARTKIPLIPGQVQATNGLFDRIGSIYDGVEKKVTNRNANKKLEYDEAIKEGRNPAVPEYETAYNIDGTLINKPGYNPNLYITQSRTPRLITEADRPLVEKILWQMVEKKTQSRNQARRARLEKAAHLQGLPVPKFVPEKVDRSQKIEIRIIDPLDKIEPYMPQDRMAIKASQDGHVPYWQRPFLSKRRNRRVRAGWGKQVSSIQAWLTGALLVIVRLGNEAFLADIRGALRNAQWRKLLKPDATYQSLFNLFTGDPVVNTRTNHLTMAYREGVVNIVKSRSFKGRQTREHLLTLLGQGKTVAGVSFDLGQKHAAGLLAAHFGLGEDGNPVFTPIQACFLPQRYLDSLTNYRNRYDALTLDMRRQSLLALTPAQQQEFADAQRDPGGQAKRACCLKLNLNPDEIRWDLVSGISTMISDLYIERGGDPRDVHQQVETKPKGKRKSEIRILKIRDGKWAYDFRPKIADETRKAQREQLWKLQKASSEFERLSRYKINIARAIANWALQWGRELSGCDIVIPVLEDLNVGSKFFDGKGKWLLGWDNRFTPKKENRWFIKVLHKAVAELAPHRGVPVYEVMPHRTSMTCPACHYCHPTNREGDRFECQSCHVVKNTDRDVAPYNILRVAVEGKTLDRWQAEKKPQAEPDRPMILIDNQES

SEQ ID NO: 124 - protein, 84 aa, Artificial Sequence
  Description of artificial sequence: synthetic polypeptide sequence
MTNLSDIIEKETGKQLVIQESILMLPEEVEEVIGNKPESDILVHTAYDESTDENVMLLTSDAPEYKPWALVIQDSNGENKIKML

SEQ ID NO: 125 - DNA, 23 bp, Artificial Sequence
  Description of artificial sequence: target sequence oligonucleotide sequence
cttgaccaatagccttgacaagg

SEQ ID NO: 126 - RNA, 102 nt, Artificial Sequence
  Description of artificial sequence: guide RNA polynucleotide sequence
  modified_base (1)..(1): gm
  misc_feature (2)..(4): In embodiments, a nucleotide(s) is linked to the preceding 5' nucleotide by a 3' phosphorothioate internucleotide liknage
  modified_base (2)..(2): 2-O-methylated nucleobase
  modified_base (3)..(3): cm
  misc_feature (100)..(102): In embodiments, a nucleotide(s) is linked to the preceding 5' nucleotide by a 3' phosphorothioate internucleotide liknage
  modified_base (100)..(102): um
gacuucuccacaggagucaggguuuuagagcuagaaauagcaaguuaaaauaaggcuaguccguuauucaacuugaaaaaguggcaccgagucggugcuuuu

SEQ ID NO: 127 - RNA, 101 nt, Artificial Sequence
  Description of artificial sequence: guide RNA polynucleotide sequence
  modified_base (1)..(1): 2-O-methylated nucleobase
  misc_feature (2)..(4): In embodiments, a nucleotide(s) is linked to the preceding 5' nucleotide by a 3' phosphorothioate internucleotide liknage
  modified_base (2)..(2): cm
  modified_base (3)..(3): um
  modified_base (99)..(101): um
  misc_feature (99)..(101): In embodiments, a nucleotide(s) is linked to the preceding 5' nucleotide by a 3' phosphorothioate internucleotide liknage
acuucuccacaggagucaggguuuuagagcuagaaauagcaaguuaaaauaaggcuaguccguuauucaacuugaaaaaguggcaccgagucggugcuuuu

SEQ ID NO: 128 - RNA, 100 nt, Artificial Sequence
  Description of artificial sequence: guide RNA polynucleotide sequence
  modified_base (1)..(1): cm
  misc_feature (2)..(4): In embodiments, a nucleotide(s) is linked to the preceding 5' nucleotide by a 3' phosphorothioate internucleotide liknage
  modified_base (2)..(3): um
  modified_base (98)..(100): um
  misc_feature (98)..(100): In embodiments, a nucleotide(s) is linked to the preceding 5' nucleotide by a 3' phosphorothioate internucleotide liknage
cuucuccacaggagucaggguuuuagagcuagaaauagcaaguuaaaauaaggcuaguccguuauucaacuugaaaaaguggcaccgagucggugcuuuu

SEQ ID NO: 129 - RNA, 100 nt, Artificial Sequence
  Description of artificial sequence: guide RNA polynucleotide sequence
  modified_base (1)..(1): cm
  misc_feature (2)..(4): In embodiments, a nucleotide(s) is linked to the preceding 5' nucleotide by a 3' phosphorothioate internucleotide liknage
  modified_base (2)..(3): um
  misc_feature (98)..(100): In embodiments, a nucleotide(s) is linked to the preceding 5' nucleotide by a 3' phosphorothioate internucleotide liknage
  modified_base (98)..(100): um
cuugaccaauagccuugacaguuuuagagcuagaaauagcaaguuaaaauaaggcuaguccguuaucaacuugaaaaaguggcaccgagucggugcuuuu

SEQ ID NO: 130 - RNA, 20 nt, Artificial Sequence
  Description of artificial sequence: gRNA spacer oligonucleotide sequence
guggggaaggggcccccaag

SEQ ID NO: 131 - RNA, 20 nt, Artificial Sequence
  Description of artificial sequence: gRNA spacer oligonucleotide sequence
auugagauaguguggggaag

SEQ ID NO: 132 - RNA, 20 nt, Artificial Sequence
  Description of artificial sequence: gRNA spacer oligonucleotide sequence
cauugagauaguguggggaa

SEQ ID NO: 133 - RNA, 20 nt, Artificial Sequence
  Description of artificial sequence: gRNA spacer oligonucleotide sequence
gcauugagauagugugggga

SEQ ID NO: 134 - RNA, 20 nt, Artificial Sequence
  Description of artificial sequence: gRNA spacer oligonucleotide sequence
guggggaaggggcccccaag

SEQ ID NO: 135 - RNA, 20 nt, Artificial Sequence
  Description of artificial sequence: gRNA spacer oligonucleotide sequence
gcuauuggucaaggcaaggc

SEQ ID NO: 136 - RNA, 20 nt, Artificial Sequence
  Description of artificial sequence: gRNA spacer oligonucleotide sequence
caaggcuauuggucaaggca

SEQ ID NO: 137 - RNA, 20 nt, Artificial Sequence
  Description of artificial sequence: gRNA spacer oligonucleotide sequence
cuugucaaggcuauugguca

SEQ ID NO: 138 - RNA, 20 nt, Artificial Sequence
  Description of artificial sequence: gRNA spacer oligonucleotide sequence
cuugaccaauagccuugaca

SEQ ID NO: 139 - RNA, 20 nt, Artificial Sequence
  Description of artificial sequence: gRNA spacer oligonucleotide sequence
guuugccuugucaaggcuau

SEQ ID NO: 140 - RNA, 20 nt, Artificial Sequence
  Description of artificial sequence: gRNA spacer oligonucleotide sequence
uggucaaguuugccuuguca

SEQ ID NO: 141 - RNA, 20 nt, Artificial Sequence
  Description of artificial sequence: gRNA spacer oligonucleotide sequence
uggggaaggggcccccaaga

SEQ ID NO: 142 - RNA, 20 nt, Artificial Sequence
  Description of artificial sequence: gRNA spacer oligonucleotide sequence
guguggggaaggggccccca

SEQ ID NO: 143 - RNA, 20 nt, Artificial Sequence
  Description of artificial sequence: gRNA spacer oligonucleotide sequence
ucagacagauauuugcauug

SEQ ID NO: 144 - RNA, 20 nt, Artificial Sequence
  Description of artificial sequence: gRNA spacer oligonucleotide sequence
uuucagacagauauuugcau

SEQ ID NO: 145 - RNA, 20 nt, Artificial Sequence
  Description of artificial sequence: gRNA spacer oligonucleotide sequence
cuugccuugaccaauagccu

SEQ ID NO: 146 - RNA, 20 nt, Artificial Sequence
  Description of artificial sequence: gRNA spacer oligonucleotide sequence
uagccuugacaaggcaaacu

SEQ ID NO: 147 - RNA, 20 nt, Artificial Sequence
  Description of artificial sequence: gRNA spacer oligonucleotide sequence
caaacuugaccaauagucuu

SEQ ID NO: 148 - RNA, 20 nt, Artificial Sequence
  Description of artificial sequence: gRNA spacer oligonucleotide sequence
uguggggaaggggcccccaa

SEQ ID NO: 149 - RNA, 20 nt, Artificial Sequence
  Description of artificial sequence: gRNA spacer oligonucleotide sequence
gggccccuuccccacacuau

SEQ ID NO: 150 - RNA, 20 nt, Artificial Sequence
  Description of artificial sequence: gRNA spacer oligonucleotide sequence
cagacagauauuugcauuga

SEQ ID NO: 151 - RNA, 20 nt, Artificial Sequence
  Description of artificial sequence: gRNA spacer oligonucleotide sequence
uuucagacagauauuugcau

SEQ ID NO: 152 - RNA, 20 nt, Artificial Sequence
  Description of artificial sequence: gRNA spacer oligonucleotide sequence
gccuugacaaggcaaacuug

SEQ ID NO: 153 - RNA, 20 nt, Artificial Sequence
  Description of artificial sequence: gRNA spacer oligonucleotide sequence
uugacaaggcaaacuugacc

SEQ ID NO: 154 - RNA, 20 nt, Artificial Sequence
  Description of artificial sequence: gRNA spacer oligonucleotide sequence
ugaccaauagucuuagagua

SEQ ID NO: 155 - RNA, 23 nt, Artificial Sequence
  Description of artificial sequence: gRNA spacer oligonucleotide sequence
agacagauauuugcauugagaua

SEQ ID NO: 156 - protein, 1129 aa, Alicyclobacillus acido-terrestris
  MISC_FEATURE (1)..(1129): Cas12b/C2c1; sp|T0D7A2|C2C1_ALIAG CRISPR-associated endonuclease C2c1 OS = Alicyclobacillus acido-terrestris (strain ATCC 49025 / DSM 3922/ CIP 106132 / NCIMB 13137/GD3B) GN=c2c1 PE=1 SV=1; Cas12b/C2c1 polypeptide sequence
MAVKSIKVKLRLDDMPEIRAGLWKLHKEVNAGVRYYTEWLSLLRQENLYRRSPNGDGEQECDKTAEECKAELLERLRARQVENGHRGPAGSDDELLQLARQLYELLVPQAIGAKGDAQQIARKFLSPLADKDAVGGLGIAKAGNKPRWVRMREAGEPGWEEEKEKAETRKSADRTADVLRALADFGLKPLMRVYTDSEMSSVEWKPLRKGQAVRTWDRDMFQQAIERMMSWESWNQRVGQEYAKLVEQKNRFEQKNFVGQEHLVHLVNQLQQDMKEASPGLESKEQTAHYVTGRALRGSDKVFEKWGKLAPDAPFDLYDAEIKNVQRRNTRRFGSHDLFAKLAEPEYQALWREDASFLTRYAVYNSILRKLNHAKMFATFTLPDATAHPIWTRFDKLGGNLHQYTFLFNEFGERRHAIRFHKLLKVENGVAREVDDVTVPISMSEQLDNLLPRDPNEPIALYFRDYGAEQHFTGEFGGAKIQCRRDQLAHMHRRRGARDVYLNVSVRVQSQSEARGERRPPYAAVFRLVGDNHRAFVHFDKLSDYLAEHPDDGKLGSEGLLSGLRVMSVDLGLRTSASISVFRVARKDELKPNSKGRVPFFFPIKGNDNLVAVHERSQLLKLPGETESKDLRAIREERQRTLRQLRTQLAYLRLLVRCGSEDVGRRERSWAKLIEQPVDAANHMTPDWREAFENELQKLKSLHGICSDKEWMDAVYESVRRVWRHMGKQVRDWRKDVRSGERPKIRGYAKDVVGGNSIEQIEYLERQYKFLKSWSFFGKVSGQVIRAEKGSRFAITLREHIDHAKEDRLKKLADRIIMEALGYVYALDERGKGKWVAKYPPCQLILLEELSEYQFNNDRPPSENNQLMQWSHRGVFQELINQAQVHDLLVGTMYAAFSSRFDARTGAPGIRCRRVPARCTQEHNPEPFPWWLNKFVVEHTLDACPLRADDLIPTGEGEIFVSPFSAEEGDFHQIHADLNAAQNLQQRLWSDFDISQIRLRCDWGEVDGELVLIPRLTGKRTADSYSNKVFYTNTGVTYYERERGKKRRKVFAQEKLSEEEAELLVEADEAREKSVVLMRDPSGIINRGNWTRQKEFWSMVNQRIEGYLVKQIRSRVPLQDSACENTGDI

SEQ ID NO: 157 - protein, 1368 aa, Mus musculus
  MISC_FEATURE (1)..(1368): high fidelity Cas9 polypeptide sequence
MDKKYSIGLAIGTNSVGWAVITDEYKVPSKKFKVLGNTDRHSIKKNLIGALLFDSGETAEATRLKRTARRRYTRRKNRICYLQEIFSNEMAKVDDSFFHRLEESFLVEEDKKHERHPIFGNIVDEVAYHEKYPTIYHLRKKLVDSTDKADLRLIYLALAHMIKFRGHFLIEGDLNPDNSDVDKLFIQLVQTYNQLFEENPINASGVDAKAILSARLSKSRRLENLIAQLPGEKKNGLFGNLIALSLGLTPNFKSNFDLAEDAKLQLSKDTYDDDLDNLLAQIGDQYADLFLAAKNLSDAILLSDILRVNTEITKAPLSASMIKRYDEHHQDLTLLKALVRQQLPEKYKEIFFDQSKNGYAGYIDGGASQEEFYKFIKPILEKMDGTEELLVKLNREDLLRKQRTFDNGSIPHQIHLGELHAILRRQEDFYPFLKDNREKIEKILTFRIPYYVGPLARGNSRFAWMTRKSEETITPWNFEEVVDKGASAQSFIERMTAFDKNLPNEKVLPKHSLLYEYFTVYNELTKVKYVTEGMRKPAFLSGEQKKAIVDLLFKTNRKVTVKQLKEDYFKKIECFDSVEISGVEDRFNASLGTYHDLLKIIKDKDFLDNEENEDILEDIVLTLTLFEDREMIEERLKTYAHLFDDKVMKQLKRRRYTGWGALSRKLINGIRDKQSGKTILDFLKSDGFANRNFMALIHDDSLTFKEDIQKAQVSGQGDSLHEHIANLAGSPAIKKGILQTVKVVDELVKVMGRHKPENIVIEMARENQTTQKGQKNSRERMKRIEEGIKELGSQILKEHPVENTQLQNEKLYLYYLQNGRDMYVDQELDINRLSDYDVDHIVPQSFLKDDSIDNKVLTRSDKNRGKSDNVPSEEVVKKMKNYWRQLLNAKLITQRKFDNLTKAERGGLSELDKAGFIKRQLVETRAITKHVAQILDSRMNTKYDENDKLIREVKVITLKSKLVSDFRKDFQFYKVREINNYHHAHDAYLNAVVGTALIKKYPKLESEFVYGDYKVYDVRKMIAKSEQEIGKATAKYFFYSNIMNFFKTEITLANGEIRKRPLIETNGETGEIVWDKGRDFATVRKVLSMPQVNIVKKTEVQTGGFSKESILPKRNSDKLIARKKDWDPKKYGGFDSPTVAYSVLVVAKVEKGKSKKLKSVKELLGITIMERSSFEKNPIDFLEAKGYKEVKKDLIIKLPKYSLFELENGRKRMLASAGELQKGNELALPSKYVNFLYLASHYEKLKGSPEDNEQKQLFVEQHKHYLDEIIEQISEFSKRVILADANLDKVLSAYNKHRDKPIREQAENIIHLFTLTNLGAPAAFKYFDTTIDRKRYTSTKEVLDATLIHQSITGLYETRIDLSQLGGD

SEQ ID NO: 158 - protein, 1368 aa, Streptococcus pyogenes [sequence omitted]

SEQ ID NO: 159 - protein, 1368 aa, S. pyogenes
  MISC_FEATURE (1)..(1368): PAM-binding SpEQR Cas9 polypeptide sequence
MDKKYSIGLAIGTNSVGWAVITDEYKVPSKKFKVLGNTDRHSIKKNLIGALLFDSGETAEATRLKRTARRRYTRRKNRICYLQEIFSNEMAKVDDSFFHRLEESVLVEEDKKHERHPIFGNIVDEVAYHEKYPTIYHLRKKLVDSTDKADLRLIYLALAHMIKFRGHFLIEGDLNPDNSDVDKLFIQLVQTYNQLFEENPINASGVDAKAILSARLSKSRRLENLIAQLPGEKKNGLFGNLIALSLGLTPNFKSNFDLAEDAKLQLSKDTYDDDLDNLLAQIGDQYADLFLAAKNLSDAILLSDILRVNTEITKAPLSASMIKRYDEHHQDLTLLKALVRQQLPEKYKEIFFDQSKNGYAGYIDGGASQEEFYKFIKPILEKMDGTEELLVKLNREDLLRKQRTFDNGSIPHQIHLGELHAILRRQEDFYPFLKDNREKIEKILTFRIPYYVGPLARGNSRFAWMTRKSEETITPWNFEEVVDKGASAQSFIERMTNFDKNLPNEKVLPKHSLLYEYFTVYNELTKVKYVTEGMRKPAFLSGEQKKAIVDLLFKTNRKVTVKQLKEDYFKKIECFDSVEISGVEDRFNASLGTYHDLLKIIKDKDFLDNEENEDILEDIVLTLTLFEDREMIEERLKTYAHLFDDKVMKQLKRRRYTGWGRLSRKLINGIRDKQSGKTILDFLKSDGFANRNFMQLIHDDSLTFKEDIQKAQVSGQGDSLHEHIANLAGSPAIKKGILQTVKVVDELVKVMGRHKPENIVIEMARENQTTQKGQKNSRERMKRIEEGIKELGSQILKEHPVENTQLQNEKLYLYYLQNGRDMYVDQELDINRLSDYDVDHIVPQSFLKDDSIDNKVLTRSDKNRGKSDNVPSEEVVKKMKNYWRQLLNAKLITQRKFDNLTKAERGGLSELDKAGFIKRQLVETRQITKHVAQILDSRMNTKYDENDKLIREVKVITLKSKLVSDFRKDFQFYKVREINNYHHAHDAYLNAVVGTALIKKYPKLESEFVYGDYKVYDVRKMIAKSEQEIGKATAKYFFYSNIMNFFKTEITLANGEIRKRPLIETNGETGEIVWDKGRDFATVRKVLSMPQVNIVKKTEVQTGGFSKESILPKRNSDKLIARKKDWDPKKYGGFESPTVAYSVLVVAKVEKGKSKKLKSVKELLGITIMERSSFEKNPIDFLEAKGYKEVKKDLIIKLPKYSLFELENGRKRMLASAGELQKGNELALPSKYVNFLYLASHYEKLKGSPEDNEQKQLFVEQHKHYLDEIIEQISEFSKRVILADANLDKVLSAYNKHRDKPIREQAENIIHLFTLTNLGAPAAFKYFDTTIDRKQYRSTKEVLDATLIHQSITGLYETRIDLSQLGGD

SEQ ID NO: 160 - protein, 1368 aa, S. pyogenes
  MISC_FEATURE (1)..(1368): PAM-binding SpVQR Cas9 polypeptide sequence
MDKKYSIGLAIGTNSVGWAVITDEYKVPSKKFKVLGNTDRHSIKKNLIGALLFDSGETAEATRLKRTARRRYTRRKNRICYLQEIFSNEMAKVDDSFFHRLEESFLVEEDKKHERHPIFGNIVDEVAYHEKYPTIYHLRKKLVDSTDKADLRLIYLALAHMIKFRGHFLIEGDLNPDNSDVDKLFIQLVQTYNQLFEENPINASGVDAKAILSARLSKSRRLENLIAQLPGEKKNGLFGNLIALSLGLTPNFKSNFDLAEDAKLQLSKDTYDDDLDNLLAQIGDQYADLFLAAKNLSDAILLSDILRVNTEITKAPLSASMIKRYDEHHQDLTLLKALVRQQLPEKYKEIFFDQSKNGYAGYIDGGASQEEFYKFIKPILEKMDGTEELLVKLNREDLLRKQRTFDNGSIPHQIHLGELHAILRRQEDFYPFLKDNREKIEKILTFRIPYYVGPLARGNSRFAWMTRKSEETITPWNFEEVVDKGASAQSFIERMTNFDKNLPNEKVLPKHSLLYEYFTVYNELTKVKYVTEGMRKPAFLSGEQKKAIVDLLFKTNRKVTVKQLKEDYFKKIECFDSVEISGVEDRFNASLGTYHDLLKIIKDKDFLDNEENEDILEDIVLTLTLFEDREMIEERLKTYAHLFDDKVMKQLKRRRYTGWGRLSRKLINGIRDKQSGKTILDFLKSDGFANRNFMQLIHDDSLTFKEDIQKAQVSGQGDSLHEHIANLAGSPAIKKGILQTVKVVDELVKVMGRHKPENIVIEMARENQTTQKGQKNSRERMKRIEEGIKELGSQILKEHPVENTQLQNEKLYLYYLQNGRDMYVDQELDINRLSDYDVDHIVPQSFLKDDSIDNKVLTRSDKNRGKSDNVPSEEVVKKMKNYWRQLLNAKLITQRKFDNLTKAERGGLSELDKAGFIKRQLVETRQITKHVAQILDSRMNTKYDENDKLIREVKVITLKSKLVSDFRKDFQFYKVREINNYHHAHDAYLNAVVGTALIKKYPKLESEFVYGDYKVYDVRKMIAKSEQEIGKATAKYFFYSNIMNFFKTEITLANGEIRKRPLIETNGETGEIVWDKGRDFATVRKVLSMPQVNIVKKTEVQTGGFSKESILPKRNSDKLIARKKDWDPKKYGGFVSPTVAYSVLVVAKVEKGKSKKLKSVKELLGITIMERSSFEKNPIDFLEAKGYKEVKKDLIIKLPKYSLFELENGRKRMLASAGELQKGNELALPSKYVNFLYLASHYEKLKGSPEDNEQKQLFVEQHKHYLDEIIEQISEFSKRVILADANLDKVLSAYNKHRDKPIREQAENIIHLFTLTNLGAPAAFKYFDTTIDRKQYRSTKEVLDATLIHQSITGLYETRIDLSQLGGD

SEQ ID NO: 161 - protein, 1368 aa, S. pyogenes
  MISC_FEATURE (1)..(1368): SpVQR Cas9 polypeptide sequence
MDKKYSIGLAIGTNSVGWAVITDEYKVPSKKFKVLGNTDRHSIKKNLIGALLFDSGETAEATRLKRTARRRYTRRKNRICYLQEIFSNEMAKVDDSFFHRLEESFLVEEDKKHERHPIFGNIVDEVAYHEKYPTIYHLRKKLVDSTDKADLRLIYLALAHMIKFRGHFLIEGDLNPDNSDVDKLFIQLVQTYNQLFEENPINASGVDAKAILSARLSKSRRLENLIAQLPGEKKNGLFGNLIALSLGLTPNFKSNFDLAEDAKLQLSKDTYDDDLDNLLAQIGDQYADLFLAAKNLSDAILLSDILRVNTEITKAPLSASMIKRYDEHHQDLTLLKALVRQQLPEKYKEIFFDQSKNGYAGYIDGGASQEEFYKFIKPILEKMDGTEELLVKLNREDLLRKQRTFDNGSIPHQIHLGELHAILRRQEDFYPFLKDNREKIEKILTFRIPYYVGPLARGNSRFAWMTRKSEETITPWNFEEVVDKGASAQSFIERMTNFDKNLPNEKVLPKHSLLYEYFTVYNELTKVKYVTEGMRKPAFLSGEQKKAIVDLLFKTNRKVTVKQLKEDYFKKIECFDSVEISGVEDRFNASLGTYHDLLKIIKDKDFLDNEENEDILEDIVLTLTLFEDREMIEERLKTYAHLFDDKVMKQLKRRRYTGWGRLSRKLINGIRDKQSGKTILDFLKSDGFANRNFMQLIHDDSLTFKEDIQKAQVSGQGDSLHEHIANLAGSPAIKKGILQTVKVVDELVKVMGRHKPENIVIEMARENQTTQKGQKNSRERMKRIEEGIKELGSQILKEHPVENTQLQNEKLYLYYLQNGRDMYVDQELDINRLSDYDVDHIVPQSFLKDDSIDNKVLTRSDKNRGKSDNVPSEEVVKKMKNYWRQLLNAKLITQRKFDNLTKAERGGLSELDKAGFIKRQLVETRQITKHVAQILDSRMNTKYDENDKLIREVKVITLKSKLVSDFRKDFQFYKVREINNYHHAHDAYLNAVVGTALIKKYPKLESEFVYGDYKVYDVRKMIAKSEQEIGKATAKYFFYSNIMNFFKTEITLANGEIRKRPLIETNGETGEIVWDKGRDFATVRKVLSMPQVNIVKKTEVQTGGFSKESILPKRNSDKLIARKKDWDPKKYGGFVSPTVAYSVLVVAKVEKGKSKKLKSVKELLGITIMERSSFEKNPIDFLEAKGYKEVKKDLIIKLPKYSLFELENGRKRMLASARELQKGNELALPSKYVNFLYLASHYEKLKGSPEDNEQKQLFVEQHKHYLDEIIEQISEFSKRVILADANLDKVLSAYNKHRDKPIREQAENIIHLFTLTNLGAPAAFKYFDTTIDRKEYRSTKEVLDATLIHQSITGLYETRIDLSQLGGD

SEQ ID NO: 162 - protein, 1359 aa, Streptococcus macacae
  MISC_FEATURE (1)..(1359): SpyMacCas9 polypeptide sequence
MDKKYSIGLDIGTNSVGWAVITDDYKVPSKKFKVLGNTDRHSIKKNLIGALLFGSGETAEATRLKRTARRRYTRRKNRICYLQEIFSNEMAKVDDSFFHRLEESFLVEEDKKHERHPIFGNIVDEVAYHEKYPTIYHLRKKLADSTDKADLRLIYLALAHMIKFRGHFLIEGDLNPDNSDVDKLFIQLVQIYNQLFEENPINASRVDAKAILSARLSKSRRLENLIAQLPGEKRNGLFGNLIALSLGLTPNFKSNFDLAEDAKLQLSKDTYDDDLDNLLAQIGDQYADLFLAAKNLSDAILLSDILRVNSEITKAPLSASMIKRYDEHHQDLTLLKALVRQQLPEKYKEIFFDQSKNGYAGYIDGGASQEEFYKFIKPILEKMDGTEELLVKLNREDLLRKQRTFDNGSIPHQIHLGELHAILRRQEDFYPFLKDNREKIEKILTFRIPYYVGPLARGNSRFAWMTRKSEETITPWNFEEVVDKGASAQSFIERMTNFDKNLPNEKVLPKHSLLYEYFTVYNELTKVKYVTEGMRKPAFLSGEQKKAIVDLLFKTNRKVTVKQLKEDYFKKIECFDSVEISGVEDRFNASLGAYHDLLKIIKDKDFLDNEENEDILEDIVLTLTLFEDRGMIEERLKTYAHLFDDKVMKQLKRRRYTGWGRLSRKLINGIRDKQSGKTILDFLKSDGFANRNFMQLIHDDSLTFKEDIQKAQVSGQGHSLHEQIANLAGSPAIKKGILQTVKIVDELVKVMGHKPENIVIEMARENQTTQKGQKNSRERMKRIEEGIKELGSQILKEHPVENTQLQNEKLYLYYLQNGRDMYVDQELDINRLSDYDVDHIVPQSFIKDDSIDNKVLTRSDKNRGKSDNVPSEEVVKKMKNYWRQLLNAKLITQRKFDNLTKAERGGLSELDKAGFIKRQLVETRQITKHVAQILDSRMNTKYDENDKLIREVKVITLKSKLVSDFRKDFQFYKVREINNYHHAHDAYLNAVVGTALIKKYPKLESEFVYGDYKVYDVRKMIAKSEQEIGKATAKYFFYSNIMNFFKTEITLANGEIRKRPLIETNGETGEIVWDKGRDFATVRKVLSMPQVNIVKKTEIQTVGQNGGLFDDNPKSPLEVTPSKLVPLKKELNPKKYGGYQKPTTAYPVLLITDTKQLIPISVMNKKQFEQNPVKFLRDRGYQQVGKNDFIKLPKYTLVDIGDGIKRLWASSKEIHKGNQLVVSKKSQILLYHAHHLDSDLSNDYLQNHNQQFDVLFNEIISFSKKCKLGKEHIQKIENVYSNKKNSASIEELAESFIKLLGFTQLGATSPFNFLGVKLNQKQYKGKKDYILPCTEGTLIRQSITGLYETRVDLSKIGED

SEQ ID NO: 163 - protein, 1410 aa, Artificial Sequence
  Description of artificial sequence: CP5 polypeptide sequence
  MISC_FEATURE (1)..(341): Sequence derived from Cas9
  MISC_FEATURE (342)..(362): Linker sequence
  MISC_FEATURE (363)..(1388): Sequence derived from Cas9
  MISC_FEATURE (1389)..(1410): Bipartite nuclear localization sequence
EIGKATAKYFFYSNIMNFFKTEITLANGEIRKRPLIETNGETGEIVWDKGRDFATVRKVLSMPQVNIVKKTEVQTGGFSKESILPKRNSDKLIARKKDWDPKKYGGFMQPTVAYSVLVVAKVEKGKSKKLKSVKELLGITIMERSSFEKNPIDFLEAKGYKEVKKDLIIKLPKYSLFELENGRKRMLASAKFLQKGNELALPSKYVNFLYLASHYEKLKGSPEDNEQKQLFVEQHKHYLDEIIEQISEFSKRVILADANLDKVLSAYNKHRDKPIREQAENIIHLFTLTNLGAPRAFKYFDTTIARKEYRSTKEVLDATLIHQSITGLYETRIDLSQLGGDGGSGGSGGSGGSGGSGGSGGMDKKYSIGLAIGTNSVGWAVITDEYKVPSKKFKVLGNTDRHSIKKNLIGALLFDSGETAEATRLKRTARRRYTRRKNRICYLQEIFSNEMAKVDDSFFHRLEESFLVEEDKKHERHPIFGNIVDEVAYHEKYPTIYHLRKKLVDSTDKADLRLIYLALAHMIKFRGHFLIEGDLNPDNSDVDKLFIQLVQTYNQLFEENPINASGVDAKAILSARLSKSRRLENLIAQLPGEKKNGLFGNLIALSLGLTPNFKSNFDLAEDAKLQLSKDTYDDDLDNLLAQIGDQYADLFLAAKNLSDAILLSDILRVNTEITKAPLSASMIKRYDEHHQDLTLLKALVRQQLPEKYKEIFFDQSKNGYAGYIDGGASQEEFYKFIKPILEKMDGTEELLVKLNREDLLRKQRTFDNGSIPHQIHLGELHAILRRQEDFYPFLKDNREKIEKILTFRIPYYVGPLARGNSRFAWMTRKSEETITPWNFEEVVDKGASAQSFIERMTNFDKNLPNEKVLPKHSLLYEYFTVYNELTKVKYVTEGMRKPAFLSGEQKKAIVDLLFKTNRKVTVKQLKEDYFKKIECFDSVEISGVEDRFNASLGTYHDLLKIIKDKDFLDNEENEDILEDIVLTLTLFEDREMIEERLKTYAHLFDDKVMKQLKRRRYTGWGRLSRKLINGIRDKQSGKTILDFLKSDGFANRNFMQLIHDDSLTFKEDIQKAQVSGQGDSLHEHIANLAGSPAIKKGILQTVKVVDELVKVMGRHKPENIVIEMARENQTTQKGQKNSRERMKRIEEGIKELGSQILKEHPVENTQLQNEKLYLYYLQNGRDMYVDQELDINRLSDYDVDHIVPQSFLKDDSIDNKVLTRSDKNRGKSDNVPSEEVVKKMKNYWRQLLNAKLITQRKFDNLTKAERGGLSELDKAGFIKRQLVETRQITKHVAQILDSRMNTKYDENDKLIREVKVITLKSKLVSDFRKDFQFYKVREINNYHHAHDAYLNAVVGTALIKKYPKLESEFVYGDYKVYDVRKMIAKSEQEGADKRTADGSEFESPKKKRKV

SEQ ID NO: 164 - protein, 1302 aa, Artificial Sequence
  Description of artificial sequence: Cas12c1 polypeptide sequence
MQTKKTHLHLISAKASRKYRRTIACLSDTAKKDLERRKQSGAADPAQELSCLKTIKFKLEVPEGSKLPSFDRISQIYNALETIEKGSLSYLLFALILSGFRIFPNSSAAKTFASSSCYKNDQFASQIKEIFGEMVKNFIPSELESILKKGRRKNNKDWTEENIKRVLNSEFGRKNSEGSSALFDSFLSKFSQELFRKFDSWNEVNKKYLEAAELLDSMLASYGPFDSVCKMIGDSDSRNSLPDKSTIAFTNNAEITVDIESSVMPYMAIAALLREYRQSKSKAAPVAYVQSHLTTTNGNGLSWFFKFGLDLIRKAPVSSKQSTSDGSKSLQELFSVPDDKLDGLKFIKEACEALPEASLLCGEKGELLGYQDFRTSFAGHIDSWVANYVNRLFELIELVNQLPESIKLPSILTQKNHNLVASLGLQEAEVSHSLELFEGLVKNVRQTLKKLAGIDISSSPNEQDIKEFYAFSDVLNRLGSIRNQIENAVQTAKKDKIDLESAIEWKEWKKLKKLPKLNGLGGGVPKQQELLDKALESVKQIRHYQRIDFERVIQWAVNEHCLETVPKFLVDAEKKKINKESSTDFAAKENAVRFLLEGIGAAARGKTDSVSKAAYNWFVVNNFLAKKDLNRYFINCQGCIYKPPYSKRRSLAFALRSDNKDTIEVVWEKFETFYKEISKEIEKFNIFSQEFQTFLHLENLRMKLLLRRIQKPIPAEIAFFSLPQEYYDSLPPNVAFLALNQEITPSEYITQFNLYSSFLNGNLILLRRSRSYLRAKFSWVGNSKLIYAAKEARLWKIPNAYWKSDEWKMILDSNVLVFDKAGNVLPAPTLKKVCEREGDLRLFYPLLRQLPHDWCYRNPFVKSVGREKNVIEVNKEGEPKVASALPGSLFRLIGPAPFKSLLDDCFFNPLDKDLRECMLIVDQEISQKVEAQKVEASLESCTYSIAVPIRYHLEEPKVSNQFENVLAIDQGEAGLAYAVFSLKSIGEAETKPIAVGTIRIPSIRRLIHSVSTYRKKKQRLQNFKQNYDSTAFIMRENVTGDVCAKIVGLMKEFNAFPVLEYDVKNLESGSRQLSAVYKAVNSHFLYFKEPGRDALRKQLWYGGDSWTIDGIEIVTRERKEDGKEGVEKIVPLKVFPGRSVSARFTSKTCSCCGRNVFDWLFTEKKAKTNKKFNVNSKGELTTADGVIQLFEADRSKGPKFYARRKERTPLTKPIAKGSYSLEEIERRVRTNLRRAPKSKQSRDTSQSQYFCVYKDCALHFSGMQADENAAINIGRRFLTALRKNRRSDFPSNVKISDRLLDN

SEQ ID NO: 165 - protein, 1218 aa, Artificial Sequence
  Description of artificial sequence: Cas12c2 polypeptide sequence
MTKHSIPLHAFRNSGADARKWKGRIALLAKRGKETMRTLQFPLEMSEPEAAAINTTPFAVAYNAIEGTGKGTLFDYWAKLHLAGFRFFPSGGAATIFRQQAVFEDASWNAAFCQQSGKDWPWLVPSKLYERFTKAPREVAKKDGSKKSIEFTQENVANESHVSLVGASITDKTPEDQKEFFLKMAGALAEKFDSWKSANEDRIVAMKVIDEFLKSEGLHLPSLENIAVKCSVETKPDNATVAWHDAPMSGVQNLAIGVFATCASRIDNIYDLNGGKLSKLIQESATTPNVTALSWLFGKGLEYFRTTDIDTIMQDFNIPASAKESIKPLVESAQAIPTMTVLGKKNYAPFRPNFGGKIDSWIANYASRLMLLNDILEQIEPGFELPQALLDNETLMSGIDMTGDELKELIEAVYAWVDAAKQGLATLLGRGGNVDDAVQTFEQFSAMMDTLNGTLNTISARYVRAVEMAGKDEARLEKLIECKFDIPKWCKSVPKLVGISGGLPKVEEEIKVMNAAFKDVRARMFVRFEEIAAYVASKGAGMDVYDALEKRELEQIKKLKSAVPERAHIQAYRAVLHRIGRAVQNCSEKTKQLFSSKVIEMGVFKNPSHLNNFIFNQKGAIYRSPFDRSRHAPYQLHADKLLKNDWLELLAEISATLMASESTEQMEDALRLERTRLQLQLSGLPDWEYPASLAKPDIEVEIQTALKMQLAKDTVTSDVLQRAFNLYSSVLSGLTFKLLRRSFSLKMRFSVADTTQLIYVPKVCDWAIPKQYLQAEGEIGIAARVVTESSPAKMVTEVEMKEPKALGHFMQQAPHDWYFDASLGGTQVAGRIVEKGKEVGKERKLVGYRMRGNSAYKTVLDKSLVGNTELSQCSMIIEIPYTQTVDADFRAQVQAGLPKVSINLPVKETITASNKDEQMLFDRFVAIDLGERGLGYAVFDAKTLELQESGHRPIKAITNLLNRTHHYEQRPNQRQKFQAKFNVNLSELRENTVGDVCHQINRICAYYNAFPVLEYMVPDRLDKQLKSVYESVTNRYIWSSTDAHKSARVQFWLGGETWEHPYLKSAKDKKPLVLSPGRGASGKGTSQTCSCCGRNPFDLIKDMKPRAKIAVVDGKAKLENSELKLFERNLESKDDMLARRHRNERAGMEQPLTPGNYTVDEIKALLRANLRRAPKNRRTKDTTVSEYHCVFSDCGKTMHADENAAVNIGGKFIADIEK

SEQ ID NO: 166 - protein, 1252 aa, Oleiphilus sp. HI0009
  MISC_FEATURE (1)..(1252): OspCas12c polypeptide sequence
MTKLRHRQKKLTHDWAGSKKREVLGSNGKLQNPLLMPVKKGQVTEFRKAFSAYARATKGEMTDGRKNMFTHSFEPFKTKPSLHQCELADKAYQSLHSYLPGSLAHFLLSAHALGFRIFSKSGEATAFQASSKIEAYESKLASELACVDLSIQNLTISTLFNALTTSVRGKGEETSADPLIARFYTLLTGKPLSRDTQGPERDLAEVISRKIASSFGTWKEMTANPLQSLQFFEEELHALDANVSLSPAFDVLIKMNDLQGDLKNRTIVFDPDAPVFEYNAEDPADIIIKLTARYAKEAVIKNQNVGNYVKNAITTTNANGLGWLLNKGLSLLPVSTDDELLEFIGVERSHPSCHALIELIAQLEAPELFEKNVFSDTRSEVQGMIDSAVSNHIARLSSSRNSLSMDSEELERLIKSFQIHTPHCSLFIGAQSLSQQLESLPEALQSGVNSADILLGSTQYMLTNSLVEESIATYQRTLNRINYLSGVAGQINGAIKRKAIDGEKIHLPAAWSELISLPFIGQPVIDVESDLAHLKNQYQTLSNEFDTLISALQKNFDLNFNKALLNRTQHFEAMCRSTKKNALSKPEIVSYRDLLARLTSCLYRGSLVLRRAGIEVLKKHKIFESNSELREHVHERKHFVFVSPLDRKAKKLLRLTDSRPDLLHVIDEILQHDNLENKDRESLWLVRSGYLLAGLPDQLSSSFINLPIITQKGDRRLIDLIQYDQINRDAFVMLVTSAFKSNLSGLQYRANKQSFVVTRTLSPYLGSKLVYVPKDKDWLVPSQMFEGRFADILQSDYMVWKDAGRLCVIDTAKHLSNIKKSVFSSEEVLAFLRELPHRTFIQTEVRGLGVNVDGIAFNNGDIPSLKTFSNCVQVKVSRTNTSLVQTLNRWFEGGKVSPPSIQFERAYYKKDDQIHEDAAKRKIRFQMPATELVHASDDAGWTPSYLLGIDPGEYGMGLSLVSINNGEVLDSGFIHINSLINFASKKSNHQTKVVPRQQYKSPYANYLEQSKDSAAGDIAHILDRLIYKLNALPVFEALSGNSQSAADQVWTKVLSFYTWGDNDAQNSIRKQHWFGASHWDIKGMLRQPPTEKKPKPYIAFPGSQVSSYGNSQRCSCCGRNPIEQLREMAKDTSIKELKIRNSEIQLFDGTIKLFNPDPSTVIERRRHNLGPSRIPVADRTFKNISPSSLEFKELITIVSRSIRHSPEFIAKKRGIGSEYFCAYSDCNSSLNSEANAAANVAQKFQKQLFFEL

SEQ ID NO: 167 - protein, 767 aa, Artificial Sequence
  Description of artificial sequence: Cas12g1 polypeptide sequence
MAQASSTPAVSPRPRPRYREERTLVRKLLPRPGQSKQEFRENVKKLRKAFLQFNADVSGVCQWAIQFRPRYGKPAEPTETFWKFFLEPETSLPPNDSRSPEFRRLQAFEAAAGINGAAALDDPAFTNELRDSILAVASRPKTKEAQRLFSRLKDYQPAHRMILAKVAAEWIESRYRRAHQNWERNYEEWKKEKQEWEQNHPELTPEIREAFNQIFQQLEVKEKRVRICPAARLLQNKDNCQYAGKNKHSVLCNQFNEFKKNHLQGKAIKFFYKDAEKYLRCGLQSLKPNVQGPFREDWNKYLRYMNLKEETLRGKNGGRLPHCKNLGQECEFNPHTALCKQYQQQLSSRPDLVQHDELYRKWRREYWREPRKPVFRYPSVKRHSIAKIFGENYFQADFKNSVVGLRLDSMPAGQYLEFAFAPWPRNYRPQPGETEISSVHLHFVGTRPRIGFRFRVPHKRSRFDCTQEELDELRSRTFPRKAQDQKFLEAARKRLLETFPGNAEQELRLLAVDLGTDSARAAFFIGKTFQQAFPLKIVKIEKLYEQWPNQKQAGDRRDASSKQPRPGLSRDHVGRHLQKMRAQASEIAQKRQELTGTPAPETTTDQAAKKATLQPFDLRGLTVHTARMIRDWARLNARQIIQLAEENQVDLIVLESLRGFRPPGYENLDQEKKRRVAFFAHGRIRRKVTEKAVERGMRVVTVPYLASSKVCAECRKKQKDNKQWEKNKKRGLFKCEGCGSQAQVDENAARVLGRVFWGEIELPTAIP

SEQ ID NO: 168 - protein, 870 aa, Artificial Sequence
  Description of artificial sequence: Cas12h1 polypeptide sequence
MKVHEIPRSQLLKIKQYEGSFVEWYRDLQEDRKKFASLLFRWAAFGYAAREDDGATYISPSQALLERRLLLGDAEDVAIKFLDVLFKGGAPSSSCYSLFYEDFALRDKAKYSGAKREFIEGLATMPLDKIIERIRQDEQLSKIPAEEWLILGAEYSPEEIWEQVAPRIVNVDRSLGKQLRERLGIKCRRPHDAGYCKILMEVVARQLRSHNETYHEYLNQTHEMKTKVANNLTNEFDLVCEFAEVLEEKNYGLGWYVLWQGVKQALKEQKKPTKIQIAVDQLRQPKFAGLLTAKWRALKGAYDTWKLKKRLEKRKAFPYMPNWDNDYQIPVGLTGLGVFTLEVKRTEVVVDLKEHGKLFCSHSHYFGDLTAEKHPSRYHLKFRHKLKLRKRDSRVEPTIGPWIEAALREITIQKKPNGVFYLGLPYALSHGIDNFQIAKRFFSAAKPDKEVINGLPSEMVVGAADLNLSNIVAPVKARIGKGLEGPLHALDYGYGELIDGPKILTPDGPRCGELISLKRDIVEIKSAIKEFKACQREGLTMSEETTTWLSEVESPSDSPRCMIQSRIADTSRRLNSFKYQMNKEGYQDLAEALRLLDAMDSYNSLLESYQRMHLSPGEQSPKEAKFDTKRASFRDLLRRRVAHTIVEYFDDCDIVFFEDLDGPSDSDSRNNALVKLLSPRTLLLYIRQALEKRGIGMVEVAKDGTSQNNPISGHVGWRNKQNKSEIYFYEDKELLVMDADEVGAMNILCRGLNHSVCPYSFVTKAPEKKNDEKKEGDYGKRVKRFLKDRYGSSNVRFLVASMGFVTVTTKRPKDALVGKRLYYHGGELVTHDLHNRMKDEIKYLVEKEVLARRVSLSDSTIKSYKSFAHV

SEQ ID NO: 169 - protein, 1093 aa, Artificial Sequence
  Description of artificial sequence: Cas12i1 polypeptide sequence
MSNKEKNASETRKAYTTKMIPRSHDRMKLLGNFMDYLMDGTPIFFELWNQFGGGIDRDIISGTANKDKISDDLLLAVNWFKVMPINSKPQGVSPSNLANLFQQYSGSEPDIQAQEYFASNFDTEKHQWKDMRVEYERLLAELQLSRSDMHHDLKLMYKEKCIGLSLSTAHYITSVMFGTGAKNNRQTKHQFYSKVIQLLEESTQINSVEQLASIILKAGDCDSYRKLRIRCSRKGATPSILKIVQDYELGTNHDDEVNVPSLIANLKEKLGRFEYECEWKCMEKIKAFLASKVGPYYLGSYSAMLENALSPIKGMTTKNCKFVLKQIDAKNDIKYENEPFGKIVEGFFDSPYFESDTNVKWVLHPHHIGESNIKTLWEDLNAIHSKYEEDIASLSEDKKEKRIKVYQGDVCQTINTYCEEVGKEAKTPLVQLLRYLYSRKDDIAVDKIIDGITFLSKKHKVEKQKINPVIQKYPSFNFGNNSKLLGKIISPKDKLKHNLKCNRNQVDNYIWIEIKVLNTKTMRWEKHHYALSSTRFLEEVYYPATSENPPDALAARFRTKTNGYEGKPALSAEQIEQIRSAPVGLRKVKKRQMRLEAARQQNLLPRYTWGKDFNINICKRGNNFEVTLATKVKKKKEKNYKVVLGYDANIVRKNTYAAIEAHANGDGVIDYNDLPVKPIESGFVTVESQVRDKSYDQLSYNGVKLLYCKPHVESRRSFLEKYRNGTMKDNRGNNIQIDFMKDFEAIADDETSLYYFNMKYCKLLQSSIRNHSSQAKEYREEIFELLRDGKLSVLKLSSLSNLSFVMFKVAKSLIGTYFGHLLKKPKNSKSDVKAPPITDEDKQKADPEMFALRLALEEKRLNKVKSKKEVIANKIVAKALELRDKYGPVLIKGENISDTTKKGKKSSTNSFLMDWLARGVANKVKEMVMMHQGLEFVEVNPNFTSHQDPFVHKNPENTFRARYSRCTPSELTEKNRKEILSFLSDKPSKRPTNAYYNEGAMAFLATYGLKKNDVLGVSLEKFKQIMANILHQRSEDQLLFPSRGGMFYLATYKLDADATSVNWNGKQFWVCNADLVAAYNVGLVDIQKDFKKK

SEQ ID NO: 170 - protein, 1054 aa, Artificial Sequence
  Description of artificial sequence: Cas12i2 polypeptide sequence
MSSAIKSYKSVLRPNERKNQLLKSTIQCLEDGSAFFFKMLQGLFGGITPEIVRFSTEQEKQQQDIALWCAVNWFRPVSQDSLTHTIASDNLVEKFEEYYGGTASDAIKQYFSASIGESYYWNDCRQQYYDLCRELGVEVSDLTHDLEILCREKCLAVATESNQNNSIISVLFGTGEKEDRSVKLRITKKILEAISNLKEIPKNVAPIQEIILNVAKATKETFRQVYAGNLGAPSTLEKFIAKDGQKEFDLKKLQTDLKKVIRGKSKERDWCCQEELRSYVEQNTIQYDLWAWGEMFNKAHTALKIKSTRNYNFAKQRLEQFKEIQSLNNLLVVKKLNDFFDSEFFSGEETYTICVHHLGGKDLSKLYKAWEDDPADPENAIVVLCDDLKNNFKKEPIRNILRYIFTIRQECSAQDILAAAKYNQQLDRYKSQKANPSVLGNQGFTWTNAVILPEKAQRNDRPNSLDLRIWLYLKLRHPDGRWKKHHIPFYDTRFFQEIYAAGNSPVDTCQFRTPRFGYHLPKLTDQTAIRVNKKHVKAAKTEARIRLAIQQGTLPVSNLKITEISATINSKGQVRIPVKFDVGRQKGTLQIGDRFCGYDQNQTASHAYSLWEVVKEGQYHKELGCFVRFISSGDIVSITENRGNQFDQLSYEGLAYPQYADWRKKASKFVSLWQITKKNKKKEIVTVEAKEKFDAICKYQPRLYKFNKEYAYLLRDIVRGKSLVELQQIRQEIFRFIEQDCGVTRLGSLSLSTLETVKAVKGIIYSYFSTALNASKNNPISDEQRKEFDPELFALLEKLELIRTRKKKQKVERIANSLIQTCLENNIKFIRGEGDLSTTNNATKKKANSRSMDWLARGVFNKIRQLAPMHNITLFGCGSLYTSHQDPLVHRNPDKAMKCRWAAIPVKDIGDWVLRKLSQNLRAKNIGTGEYYHQGVKEFLSHYELQDLEEELLKWRSDRKSNIPCWVLQNRLAEKLGNKEAVVYIPVRGGRIYFATHKVATGAVSIVFDQKQVWVCNADHVAAANIALTVKGIGEQSSDEENPDGSRIKLQLTS

SEQ ID NO: 171 - protein, 4 aa, Artificial Sequence
  Description of artificial sequence: synthetic peptide sequence
GGGS

SEQ ID NO: 172 - protein, 5 aa, Artificial Sequence
  Description of artificial sequence: synthetic peptide sequence
GGGGS

SEQ ID NO: 173 - protein, 5 aa, Artificial Sequence
  Description of artificial sequence: synthetic peptide sequence
EAAAK

SEQ ID NO: 174 - protein, 16 aa, Artificial Sequence
  Description of artificial sequence: synthetic peptide sequence
SGSETPGTSESATPES

SEQ ID NO: 175 - protein, 6 aa, Artificial Sequence
  Description of artificial sequence: linker peptide sequence
GGSGGS

SEQ ID NO: 176 - protein, 20 aa, Artificial Sequence
  Description of artificial sequence: synthetic peptide sequence
GSSGSETPGTSESATPESSG

SEQ ID NO: 177 - DNA, 18 bp, Artificial Sequence
  Description of artificial sequence: synthetic oligonucleotide sequence
ggaggctctggaggaagc

SEQ ID NO: 178 - DNA, 60 bp, Artificial Sequence
  Description of artificial sequence: synthetic oligonucleotide sequence
ggctcttctggatctgaaacacctggcacaagcgagagcgccacccctgagagctctggc

SEQ ID NO: 179 - protein, 1129 aa, Alicyclobacillus acidiphilus
  MISC_FEATURE (1)..(1129): AacCas12b polypeptide sequence
MAVKSMKVKLRLDNMPEIRAGLWKLHTEVNAGVRYYTEWLSLLRQENLYRRSPNGDGEQECYKTAEECKAELLERLRARQVENGHCGPAGSDDELLQLARQLYELLVPQAIGAKGDAQQIARKFLSPLADKDAVGGLGIAKAGNKPRWVRMREAGEPGWEEEKAKAEARKSTDRTADVLRALADFGLKPLMRVYTDSDMSSVQWKPLRKGQAVRTWDRDMFQQAIERMMSWESWNQRVGEAYAKLVEQKSRFEQKNFVGQEHLVQLVNQLQQDMKEASHGLESKEQTAHYLTGRALRGSDKVFEKWEKLDPDAPFDLYDTEIKNVQRRNTRRFGSHDLFAKLAEPKYQALWREDASFLTRYAVYNSIVRKLNHAKMFATFTLPDATAHPIWTRFDKLGGNLHQYTFLFNEFGEGRHAIRFQKLLTVEDGVAKEVDDVTVPISMSAQLDDLLPRDPHELVALYFQDYGAEQHLAGEFGGAKIQYRRDQLNHLHARRGARDVYLNLSVRVQSQSEARGERRPPYAAVFRLVGDNHRAFVHFDKLSDYLAEHPDDGKLGSEGLLSGLRVMSVDLGLRTSASISVFRVARKDELKPNSEGRVPFCFPIEGNENLVAVHERSQLLKLPGETESKDLRAIREERQRTLRQLRTQLAYLRLLVRCGSEDVGRRERSWAKLIEQPMDANQMTPDWREAFEDELQKLKSLYGICGDREWTEAVYESVRRVWRHMGKQVRDWRKDVRSGERPKIRGYQKDVVGGNSIEQIEYLERQYKFLKSWSFFGKVSGQVIRAEKGSRFAITLREHIDHAKEDRLKKLADRIIMEALGYVYALDDERGKGKWVAKYPPCQLILLEELSEYQFNNDRPPSENNQLMQWSHRGVFQELLNQAQVHDLLVGTMYAAFSSRFDARTGAPGIRCRRVPARCAREQNPEPFPWWLNKFVAEHKLDGCPLRADDLIPTGEGEFFVSPFSAEEGDFHQIHADLNAAQNLQRRLWSDFDISQIRLRCDWGEVDGEPVLIPRTTGKRTADSYGNKVFYTKTGVTYYERERGKKRRKVFAQEELSEEEAELLVEADEAREKSVVLMRDPSGIINRGDWTRQKEFWSMVNQRIEGYLVKQIRSRVRLQESACENTGDI

SEQ ID NO: 180 - protein, 1140 aa, Bacillus hisashii
  MISC_FEATURE (1)..(1140): BhCas12b polypeptide sequence
MAPKKKRKVGIHGVPAAATRSFILKIEPNEEVKKGLWKTHEVLNHGIAYYMNILKLIRQEAIYEHHEQDPKNPKKVSKAEIQAELWDFVLKMQKCNSFTHEVDKDEVFNILRELYEELVPSSVEKKGEANQLSNKFLYPLVDPNSQSGKGTASSGRKPRWYNLKIAGDPSWEEEKKKWEEDKKKDPLAKILGKLAEYGLIPLFIPYTDSNEPIVKEIKWMEKSRNQSVRRLDKDMFIQALERFLSWESWNLKVKEEYEKVEKEYKTLEERIKEDIQALKALEQYEKERQEQLLRDTLNTNEYRLSKRGLRGWREIIQKWLKMDENEPSEKYLEVFKDYQRKHPREAGDYSVYEFLSKKENHFIWRNHPEYPYLYATFCEIDKKKKDAKQQATFTLADPINHPLWVRFEERSGSNLNKYRILTEQLHTEKLKKKLTVQLDRLIYPTESGGWEEKGKVDIVLLPSRQFYNQIFLDIEEKGKHAFTYKDESIKFPLKGTLGGARVQFDRDHLRRYPHKVESGNVGRIYFNMTVNIEPTESPVSKSLKIHRDDFPKVVNFKPKELTEWIKDSKGKKLKSGIESLEIGLRVMSIDLGQRQAAAASIFEVVDQKPDIEGKLFFPIKGTELYAVHRASFNIKLPGETLVKSREVLRKAREDNLKLMNQKLNFLRNVLHFQQFEDITEREKRVTKWISRQENSDVPLVYQDELIQIRELMYKPYKDWVAFLKQLHKRLEVEIGKEVKHWRKSLSDGRKGLYGISLKNIDEIDRTRKFLLRWSLRPTEPGEVRRLEPGQRFAIDQLNHLNALKEDRLKKMANTIIMHALGYCYDVRKKKWQAKNPACQIILFEDLSNYNPYEERSRFENSKLMKWSRREIPRQVALQGEIYGLQVGEVGAQFSSRFHAKTGSPGIRCSVVTKEKLQDNRFFKNLQREGRLTLDKIAVLKEGDLYPDKGGEKFISLSKDRKCVTTHADINAAQNLQKRFWTRTHGFYKVYCKAYQVDGQTVYIPESKDQKQKIIEEFGEGYFILKDGVYEWVNAGKLKIKKGSSKQSSSELVDSDILKDSFDLASELKGEKLMLYRDPSGNVFPSDKWMAAGVFFGKLERILISKLTNQYSISTIEDDSSKQSMKRPAATKKAGQAKKKK

SEQ ID NO: 181 - protein, 1108 aa, Bacillus thermoamylovorans
  MISC_FEATURE (1)..(1108): BTCas12b.BTCas12b polypeptide sequence
MATRSFILKIEPNEEVKKGLWKTHEVLNHGIAYYMNILKLIRQEAIYEHHEQDPKNPKKVSKAEIQAELWDFVLKMQKCNSFTHEVDKDVVFNILRELYEELVPSSVEKKGEANQLSNKFLYPLVDPNSQSGKGTASSGRKPRWYNLKIAGDPSWEEEKKKWEEDKKKDPLAKILGKLAEYGLIPLFIPFTDSNEPIVKEIKWMEKSRNQSVRRLDKDMFIQALERFLSWESWNLKVKEEYEKVEKEHKTLEERIKEDIQAFKSLEQYEKERQEQLLRDTLNTNEYRLSKRGLRGWREIIQKWLKMDENEPSEKYLEVFKDYQRKHPREAGDYSVYEFLSKKENHFIWRNHPEYPYLYATFCEIDKKKKDAKQQATFTLADPINHPLWVRFEERSGSNLNKYRILTEQLHTEKLKKKLTVQLDRLIYPTESGGWEEKGKVDIVLLPSRQFYNQIFLDIEEKGKHAFTYKDESIKFPLKGTLGGARVQFDRDHLRRYPHKVESGNVGRIYFNMTVNIEPTESPVSKSLKIHRDDFPKFVNFKPKELTEWIKDSKGKKLKSGIESLEIGLRVMSIDLGQRQAAAASIFEVVDQKPDIEGKLFFPIKGTELYAVHRASFNIKLPGETLVKSREVLRKAREDNLKLMNQKLNFLRNVLHFQQFEDITEREKRVTKWISRQENSDVPLVYQDELIQIRELMYKPYKDWVAFLKQLHKRLEVEIGKEVKHWRKSLSDGRKGLYGISLKNIDEIDRTRKFLLRWSLRPTEPGEVRRLEPGQRFAIDQLNHLNALKEDRLKKMANTIIMHALGYCYDVRKKKWQAKNPACQIILFEDLSNYNPYEERSRFENSKLMKWSRREIPRQVALQGEIYGLQVGEVGAQFSSRFHAKTGSPGIRCSVVTKEKLQDNRFFKNLQREGRLTLDKIAVLKEGDLYPDKGGEKFISLSKDRKLVTTHADINAAQNLQKRFWTRTHGFYKVYCKAYQVDGQTVYIPESKDQKQKIIEEFGEGYFILKDGVYEWGNAGKLKIKKGSSKQSSSELVDSDILKDSFDLASELKGEKLMLYRDPSGNVFPSDKWMAAGVFFGKLERILISKLTNQYSISTIEDDSSKQSM

SEQ ID NO: 182 - protein, 1112 aa, Bacillus sp. V3-13
  MISC_FEATURE (1)..(1112): BvCas12b (Bacillus sp. V3-13) polypeptide sequence
MAIRSIKLKMKTNSGTDSIYLRKALWRTHQLINEGIAYYMNLLTLYRQEAIGDKTKEAYQAELINIIRNQQRNNGSSEEHGSDQEILALLRQLYELIIPSSIGESGDANQLGNKFLYPLVDPNSQSGKGTSNAGRKPRWKRLKEEGNPDWELEKKKDEERKAKDPTVKIFDNLNKYGLLPLFPLFTNIQKDIEWLPLGKRQSVRKWDKDMFIQAIERLLSWESWNRRVADEYKQLKEKTESYYKEHLTGGEEWIEKIRKFEKERNMELEKNAFAPNDGYFITSRQIRGWDRVYEKWSKLPESASPEELWKVVAEQQNKMSEGFGDPKVFSFLANRENRDIWRGHSERIYHIAAYNGLQKKLSRTKEQATFTLPDAIEHPLWIRYESPGGTNLNLFKLEEKQKKNYYVTLSKIIWPSEEKWIEKENIEIPLAPSIQFNRQIKLKQHVKGKQEISFSDYSSRISLDGVLGGSRIQFNRKYIKNHKELLGEGDIGPVFFNLVVDVAPLQETRNGRLQSPIGKALKVISSDFSKVIDYKPKELMDWMNTGSASNSFGVASLLEGMRVMSIDMGQRTSASVSIFEVVKELPKDQEQKLFYSINDTELFAIHKRSFLLNLPGEVVTKNNKQQRQERRKKRQFVRSQIRMLANVLRLETKKTPDERKKAIHKLMEIVQSYDSWTASQKEVWEKELNLLTNMAAFNDEIWKESLVELHHRIEPYVGQIVSKWRKGLSEGRKNLAGISMWNIDELEDTRRLLISWSKRSRTPGEANRIETDEPFGSSLLQHIQNVKDDRLKQMANLIIMTALGFKYDKEEKDRYKRWKETYPACQIILFENLNRYLFNLDRSRRENSRLMKWAHRSIPRTVSMQGEMFGLQVGDVRSEYSSRFHAKTGAPGIRCHALTEEDLKAGSNTLKRLIEDGFINESELAYLKKGDIIPSQGGELFVTLSKRYKKDSDNNELTVIHADINAAQNLQKRFWQQNSEVYRVPCQLARMGEDKLYIPKSQTETIKKYFGKGSFVKNNTEQEVYKWEKSEKMKIKTDTTFDLQDLDGFEDISKTIELAQEQQKKYLTMFRDPSGYFFNNETWRPQKEYWSIVNNIIKSCLKKKILSNKVEL

SEQ ID NO: 183 - DNA, 47 bp, Artificial Sequence
  Description of artificial sequence: 5'UTR oligonucleotide sequence
gggaaataagagagaaaagaagagtaagaagaaatataagagccacc

SEQ ID NO: 184 - DNA, 101 bp, Artificial Sequence
  Description of artificial sequence: 3'UTR (TriLink standard UTR) polynucleotide sequence
gctggagcctcggtggccatgcttcttgccccttgggcctccccccagcccctcctccccttcctgcacccgtacccccgtggtctttgaataaagtctga

SEQ ID NO: 185 - DNA, 3420 bp, Bacillus hisashii
  misc_feature (1)..(3420): bhCas12b (V4) polynucleotide sequence
atggccccaaagaagaagcggaaggtcggtatccacggagtcccagcagccgccaccagatccttcatcctgaagatcgagcccaacgaggaagtgaagaaaggcctctggaaaacccacgaggtgctgaaccacggaatcgcctactacatgaatatcctgaagctgatccggcaagaggccatctacgagcaccacgagcaggaccccaagaatcccaagaaggtgtccaaggccgagatccaggccgagctgtgggatttcgtgctgaagatgcagaagtgcaacagcttcacacacgaggtggacaaggacgaggtgttcaacatcctgagagagctgtacgaggaactggtgcccagcagcgtggaaaagaagggcgaagccaaccagctgagcaacaagtttctgtaccctctggtggaccccaacagccagtctggaaagggaacagccagcagcggcagaaagcccagatggtacaacctgaagattgccggcgatccctcctgggaagaagagaagaagaagtgggaagaagataagaaaaaggacccgctggccaagatcctgggcaagctggctgagtacggactgatccctctgttcatcccctacaccgacagcaacgagcccatcgtgaaagaaatcaagtggatggaaaagtcccggaaccagagcgtgcggcggctggataaggacatgttcattcaggccctggaacggttcctgagctgggagagctggaacctgaaagtgaaagaggaatacgagaaggtcgagaaagagtacaagaccctggaagagaggatcaaagaggacatccaggctctgaaggctctggaacagtatgagaaagagcggcaagaacagctgctgcgggacaccctgaacaccaacgagtaccggctgagcaagagaggccttagaggctggcgggaaatcatccagaaatggctgaaaatggacgagaacgagccctccgagaagtacctggaagtgttcaaggactaccagcggaagcaccctagagaggccggcgattacagcgtgtacgagttcctgtccaagaaagagaaccacttcatctggcggaatcaccctgagtacccctacctgtacgccaccttctgcgagatcgacaagaaaaagaaggacgccaagcagcaggccaccttcacactggccgatcctatcaatcaccctctgtgggtccgattcgaggaaagaagcggcagcaacctgaacaagtacagaatcctgaccgagcagctgcacaccgagaagctgaagaaaaagctgacagtgcagctggaccggctgatctaccctacagaatctggcggctgggaagagaagggcaaagtggacattgtgctgctgcccagccggcagttctacaaccagatcttcctggacatcgaggaaaagggcaagcacgccttcacctacaaggatgagagcatcaagttccctctgaagggcacactcggcggagccagagtgcagttcgacagagatcacctgagaagataccctcacaaggtggaaagcggcaacgtgggcagaatctacttcaacatgaccgtgaacatcgagcctacagagtccccagtgtccaagtctctgaagatccaccgggacgacttccccaaggtggtcaacttcaagcccaaagaactgaccgagtggatcaaggacagcaagggcaagaaactgaagtccggcatcgagtccctggaaatcggcctgagagtgatgagcatcgacctgggacagagacaggccgctgccgcctctattttcgaggtggtggatcagaagcccgacatcgaaggcaagctgtttttcccaatcaagggcaccgagctgtatgccgtgcacagagccagcttcaacatcaagctgcccggcgagacactggtcaagagcagagaagtgctgcggaaggccagagaggacaatctgaaactgatgaaccagaagctcaacttcctgcggaacgtgctgcacttccagcagttcgaggacatcaccgagagagagaagcgggtcaccaagtggatcagcagacaagagaacagcgacgtgcccctggtgtaccaggatgagctgatccagatccgcgagctgatgtacaagccttacaaggactgggtcgccttcctgaagcagctccacaagagactggaagtcgagatcggcaaagaagtgaagcactggcggaagtccctgagcgacggaagaaagggcctgtacggcatctccctgaagaacatcgacgagatcgatcggacccggaagttcctgctgagatggtccctgaggcctaccgaacctggcgaagtgcgtagactggaacccggccagagattcgccatcgaccagctgaatcacctgaacgccctgaaagaagatcggctgaagaagatggccaacaccatcatcatgcacgccctgggctactgctacgacgtgcggaagaagaaatggcaggctaagaaccccgcctgccagatcatcctgttcgaggatctgagcaactacaacccctacgaggaaaggtcccgcttcgagaacagcaagctcatgaagtggtccagacgcgagatccccagacaggttgcactgcagggcgagatctatggcctgcaagtgggagaagtgggcgctcagttcagcagcagattccacgccaagacaggcagccctggcatcagatgtagcgtcgtgaccaaagagaagctgcaggacaatcggttcttcaagaatctgcagagagagggcagactgaccctggacaaaatcgccgtgctgaaagagggcgatctgtacccagacaaaggcggcgagaagttcatcagcctgagcaaggatcggaagtgcgtgaccacacacgccgacatcaacgccgctcagaacctgcagaagcggttctggacaagaacccacggcttctacaaggtgtactgcaaggcctaccaggtggacggccagaccgtgtacatccctgagagcaaggaccagaagcagaagatcatcgaagagttcggcgagggctacttcattctgaaggacggggtgtacgaatgggtcaacgccggcaagctgaaaatcaagaagggcagctccaagcagagcagcagcgagctggtggatagcgacatcctgaaagacagcttcgacctggcctccgagctgaaaggcgaaaagctgatgctgtacagggaccccagcggcaatgtgttccccagcgacaaatggatggccgctggcgtgttcttcggaaagctggaacgcatcctgatcagcaagctgaccaaccagtactccatcagcaccatcgaggacgacagcagcaagcagtctatgaaaaggccggcggccacgaaaaaggccggccaggcaaaaaagaaaaag

SEQ ID NO: 186 - protein, 17 aa, Artificial Sequence
  Description of artificial sequence: synthetic peptide sequence
MAPKKKRKVGIHGVPAA

SEQ ID NO: 187 - DNA, 51 bp, Artificial Sequence
  Description of artificial sequence: synthetic oligonucleotide sequence
atggccccaaagaagaagcggaaggtcggtatccacggagtcccagcagcc

SEQ ID NO: 188 - protein, 1554 aa, Artificial Sequence
  Description of artificial sequence: 101 Cas9 TadAins 1015 polypeptide sequence
MDKKYSIGLAIGTNSVGWAVITDEYKVPSKKFKVLGNTDRHSIKKNLIGALLFDSGETAEATRLKRTARRRYTRRKNRICYLQEIFSNEMAKVDDSFFHRLEESFLVEEDKKHERHPIFGNIVDEVAYHEKYPTIYHLRKKLVDSTDKADLRLIYLALAHMIKFRGHFLIEGDLNPDNSDVDKLFIQLVQTYNQLFEENPINASGVDAKAILSARLSKSRRLENLIAQLPGEKKNGLFGNLIALSLGLTPNFKSNFDLAEDAKLQLSKDTYDDDLDNLLAQIGDQYADLFLAAKNLSDAILLSDILRVNTEITKAPLSASMIKRYDEHHQDLTLLKALVRQQLPEKYKEIFFDQSKNGYAGYIDGGASQEEFYKFIKPILEKMDGTEELLVKLNREDLLRKQRTFDNGSIPHQIHLGELHAILRRQEDFYPFLKDNREKIEKILTFRIPYYVGPLARGNSRFAWMTRKSEETITPWNFEEVVDKGASAQSFIERMTNFDKNLPNEKVLPKHSLLYEYFTVYNELTKVKYVTEGMRKPAFLSGEQKKAIVDLLFKTNRKVTVKQLKEDYFKKIECFDSVEISGVEDRFNASLGTYHDLLKIIKDKDFLDNEENEDILEDIVLTLTLFEDREMIEERLKTYAHLFDDKVMKQLKRRRYTGWGRLSRKLINGIRDKQSGKTILDFLKSDGFANRNFMQLIHDDSLTFKEDIQKAQVSGQGDSLHEHIANLAGSPAIKKGILQTVKVVDELVKVMGRHKPENIVIEMARENQTTQKGQKNSRERMKRIEEGIKELGSQILKEHPVENTQLQNEKLYLYYLQNGRDMYVDQELDINRLSDYDVDHIVPQSFLKDDSIDNKVLTRSDKNRGKSDNVPSEEVVKKMKNYWRQLLNAKLITQRKFDNLTKAERGGLSELDKAGFIKRQLVETRQITKHVAQILDSRMNTKYDENDKLIREVKVITLKSKLVSDFRKDFQFYKVREINNYHHAHDAYLNAVVGTALIKKYPKLESEFVYGDYKVGSSGSETPGTSESATPESSGSEVEFSHEYWMRHALTLAKRARDEREVPVGAVLVLNNRVIGEGWNRAIGLHDPTAHAEIMALRQGGLVMQNYRLIDATLYVTFEPCVMCAGAMIHSRIGRVVFGVRNAKTGAAGSLMDVLHYPGMNHRVEITEGILADECAALLCYFFRMPRQVFNAQKKAQSSTDYDVRKMIAKSEQEIGKATAKYFFYSNIMNFFKTEITLANGEIRKRPLIETNGETGEIVWDKGRDFATVRKVLSMPQVNIVKKTEVQTGGFSKESILPKRNSDKLIARKKDWDPKKYGGFDSPTVAYSVLVVAKVEKGKSKKLKSVKELLGITIMERSSFEKNPIDFLEAKGYKEVKKDLIIKLPKYSLFELENGRKRMLASAGELQKGNELALPSKYVNFLYLASHYEKLKGSPEDNEQKQLFVEQHKHYLDEIIEQISEFSKRVILADANLDKVLSAYNKHRDKPIREQAENIIHLFTLTNLGAPAAFKYFDTTIDRKRYTSTKEVLDATLIHQSITGLYETRIDLSQLGGD

SEQ ID NO: 189 - protein, 1554 aa, Artificial Sequence
  Description of artificial sequence: 102 Cas9 TadAins 1022 polypeptide sequence
MDKKYSIGLAIGTNSVGWAVITDEYKVPSKKFKVLGNTDRHSIKKNLIGALLFDSGETAEATRLKRTARRRYTRRKNRICYLQEIFSNEMAKVDDSFFHRLEESFLVEEDKKHERHPIFGNIVDEVAYHEKYPTIYHLRKKLVDSTDKADLRLIYLALAHMIKFRGHFLIEGDLNPDNSDVDKLFIQLVQTYNQLFEENPINASGVDAKAILSARLSKSRRLENLIAQLPGEKKNGLFGNLIALSLGLTPNFKSNFDLAEDAKLQLSKDTYDDDLDNLLAQIGDQYADLFLAAKNLSDAILLSDILRVNTEITKAPLSASMIKRYDEHHQDLTLLKALVRQQLPEKYKEIFFDQSKNGYAGYIDGGASQEEFYKFIKPILEKMDGTEELLVKLNREDLLRKQRTFDNGSIPHQIHLGELHAILRRQEDFYPFLKDNREKIEKILTFRIPYYVGPLARGNSRFAWMTRKSEETITPWNFEEVVDKGASAQSFIERMTNFDKNLPNEKVLPKHSLLYEYFTVYNELTKVKYVTEGMRKPAFLSGEQKKAIVDLLFKTNRKVTVKQLKEDYFKKIECFDSVEISGVEDRFNASLGTYHDLLKIIKDKDFLDNEENEDILEDIVLTLTLFEDREMIEERLKTYAHLFDDKVMKQLKRRRYTGWGRLSRKLINGIRDKQSGKTILDFLKSDGFANRNFMQLIHDDSLTFKEDIQKAQVSGQGDSLHEHIANLAGSPAIKKGILQTVKVVDELVKVMGRHKPENIVIEMARENQTTQKGQKNSRERMKRIEEGIKELGSQILKEHPVENTQLQNEKLYLYYLQNGRDMYVDQELDINRLSDYDVDHIVPQSFLKDDSIDNKVLTRSDKNRGKSDNVPSEEVVKKMKNYWRQLLNAKLITQRKFDNLTKAERGGLSELDKAGFIKRQLVETRQITKHVAQILDSRMNTKYDENDKLIREVKVITLKSKLVSDFRKDFQFYKVREINNYHHAHDAYLNAVVGTALIKKYPKLESEFVYGDYKVYDVRKMIGSSGSETPGTSESATPESSGSEVEFSHEYWMRHALTLAKRARDEREVPVGAVLVLNNRVIGEGWNRAIGLHDPTAHAEIMALRQGGLVMQNYRLIDATLYVTFEPCVMCAGAMIHSRIGRVVFGVRNAKTGAAGSLMDVLHYPGMNHRVEITEGILADECAALLCYFFRMPRQVFNAQKKAQSSTDAKSEQEIGKATAKYFFYSNIMNFFKTEITLANGEIRKRPLIETNGETGEIVWDKGRDFATVRKVLSMPQVNIVKKTEVQTGGFSKESILPKRNSDKLIARKKDWDPKKYGGFDSPTVAYSVLVVAKVEKGKSKKLKSVKELLGITIMERSSFEKNPIDFLEAKGYKEVKKDLIIKLPKYSLFELENGRKRMLASAGELQKGNELALPSKYVNFLYLASHYEKLKGSPEDNEQKQLFVEQHKHYLDEIIEQISEFSKRVILADANLDKVLSAYNKHRDKPIREQAENIIHLFTLTNLGAPAAFKYFDTTIDRKRYTSTKEVLDATLIHQSITGLYETRIDLSQLGGD

SEQ ID NO: 190 - protein, 1554 aa, Artificial Sequence
  Description of artificial sequence: 103 Cas9 TadAins 1029 polypeptide sequence
MDKKYSIGLAIGTNSVGWAVITDEYKVPSKKFKVLGNTDRHSIKKNLIGALLFDSGETAEATRLKRTARRRYTRRKNRICYLQEIFSNEMAKVDDSFFHRLEESFLVEEDKKHERHPIFGNIVDEVAYHEKYPTIYHLRKKLVDSTDKADLRLIYLALAHMIKFRGHFLIEGDLNPDNSDVDKLFIQLVQTYNQLFEENPINASGVDAKAILSARLSKSRRLENLIAQLPGEKKNGLFGNLIALSLGLTPNFKSNFDLAEDAKLQLSKDTYDDDLDNLLAQIGDQYADLFLAAKNLSDAILLSDILRVNTEITKAPLSASMIKRYDEHHQDLTLLKALVRQQLPEKYKEIFFDQSKNGYAGYIDGGASQEEFYKFIKPILEKMDGTEELLVKLNREDLLRKQRTFDNGSIPHQIHLGELHAILRRQEDFYPFLKDNREKIEKILTFRIPYYVGPLARGNSRFAWMTRKSEETITPWNFEEVVDKGASAQSFIERMTNFDKNLPNEKVLPKHSLLYEYFTVYNELTKVKYVTEGMRKPAFLSGEQKKAIVDLLFKTNRKVTVKQLKEDYFKKIECFDSVEISGVEDRFNASLGTYHDLLKIIKDKDFLDNEENEDILEDIVLTLTLFEDREMIEERLKTYAHLFDDKVMKQLKRRRYTGWGRLSRKLINGIRDKQSGKTILDFLKSDGFANRNFMQLIHDDSLTFKEDIQKAQVSGQGDSLHEHIANLAGSPAIKKGILQTVKVVDELVKVMGRHKPENIVIEMARENQTTQKGQKNSRERMKRIEEGIKELGSQILKEHPVENTQLQNEKLYLYYLQNGRDMYVDQELDINRLSDYDVDHIVPQSFLKDDSIDNKVLTRSDKNRGKSDNVPSEEVVKKMKNYWRQLLNAKLITQRKFDNLTKAERGGLSELDKAGFIKRQLVETRQITKHVAQILDSRMNTKYDENDKLIREVKVITLKSKLVSDFRKDFQFYKVREINNYHHAHDAYLNAVVGTALIKKYPKLESEFVYGDYKVYDVRKMIAKSEQEIGSSGSETPGTSESATPESSGSEVEFSHEYWMRHALTLAKRARDEREVPVGAVLVLNNRVIGEGWNRAIGLHDPTAHAEIMALRQGGLVMQNYRLIDATLYVTFEPCVMCAGAMIHSRIGRVVFGVRNAKTGAAGSLMDVLHYPGMNHRVEITEGILADECAALLCYFFRMPRQVFNAQKKAQSSTDGKATAKYFFYSNIMNFFKTEITLANGEIRKRPLIETNGETGEIVWDKGRDFATVRKVLSMPQVNIVKKTEVQTGGFSKESILPKRNSDKLIARKKDWDPKKYGGFDSPTVAYSVLVVAKVEKGKSKKLKSVKELLGITIMERSSFEKNPIDFLEAKGYKEVKKDLIIKLPKYSLFELENGRKRMLASAGELQKGNELALPSKYVNFLYLASHYEKLKGSPEDNEQKQLFVEQHKHYLDEIIEQISEFSKRVILADANLDKVLSAYNKHRDKPIREQAENIIHLFTLTNLGAPAAFKYFDTTIDRKRYTSTKEVLDATLIHQSITGLYETRIDLSQLGGD

SEQ ID NO: 191 - protein, 1554 aa, Artificial Sequence
  Description of artificial sequence: 103 Cas9 TadAins 1040 polypeptide sequence
MDKKYSIGLAIGTNSVGWAVITDEYKVPSKKFKVLGNTDRHSIKKNLIGALLFDSGETAEATRLKRTARRRYTRRKNRICYLQEIFSNEMAKVDDSFFHRLEESFLVEEDKKHERHPIFGNIVDEVAYHEKYPTIYHLRKKLVDSTDKADLRLIYLALAHMIKFRGHFLIEGDLNPDNSDVDKLFIQLVQTYNQLFEENPINASGVDAKAILSARLSKSRRLENLIAQLPGEKKNGLFGNLIALSLGLTPNFKSNFDLAEDAKLQLSKDTYDDDLDNLLAQIGDQYADLFLAAKNLSDAILLSDILRVNTEITKAPLSASMIKRYDEHHQDLTLLKALVRQQLPEKYKEIFFDQSKNGYAGYIDGGASQEEFYKFIKPILEKMDGTEELLVKLNREDLLRKQRTFDNGSIPHQIHLGELHAILRRQEDFYPFLKDNREKIEKILTFRIPYYVGPLARGNSRFAWMTRKSEETITPWNFEEVVDKGASAQSFIERMTNFDKNLPNEKVLPKHSLLYEYFTVYNELTKVKYVTEGMRKPAFLSGEQKKAIVDLLFKTNRKVTVKQLKEDYFKKIECFDSVEISGVEDRFNASLGTYHDLLKIIKDKDFLDNEENEDILEDIVLTLTLFEDREMIEERLKTYAHLFDDKVMKQLKRRRYTGWGRLSRKLINGIRDKQSGKTILDFLKSDGFANRNFMQLIHDDSLTFKEDIQKAQVSGQGDSLHEHIANLAGSPAIKKGILQTVKVVDELVKVMGRHKPENIVIEMARENQTTQKGQKNSRERMKRIEEGIKELGSQILKEHPVENTQLQNEKLYLYYLQNGRDMYVDQELDINRLSDYDVDHIVPQSFLKDDSIDNKVLTRSDKNRGKSDNVPSEEVVKKMKNYWRQLLNAKLITQRKFDNLTKAERGGLSELDKAGFIKRQLVETRQITKHVAQILDSRMNTKYDENDKLIREVKVITLKSKLVSDFRKDFQFYKVREINNYHHAHDAYLNAVVGTALIKKYPKLESEFVYGDYKVYDVRKMIAKSEQEIGKATAKYFFYSGSSGSETPGTSESATPESSGSEVEFSHEYWMRHALTLAKRARDEREVPVGAVLVLNNRVIGEGWNRAIGLHDPTAHAEIMALRQGGLVMQNYRLIDATLYVTFEPCVMCAGAMIHSRIGRVVFGVRNAKTGAAGSLMDVLHYPGMNHRVEITEGILADECAALLCYFFRMPRQVFNAQKKAQSSTDNIMNFFKTEITLANGEIRKRPLIETNGETGEIVWDKGRDFATVRKVLSMPQVNIVKKTEVQTGGFSKESILPKRNSDKLIARKKDWDPKKYGGFDSPTVAYSVLVVAKVEKGKSKKLKSVKELLGITIMERSSFEKNPIDFLEAKGYKEVKKDLIIKLPKYSLFELENGRKRMLASAGELQKGNELALPSKYVNFLYLASHYEKLKGSPEDNEQKQLFVEQHKHYLDEIIEQISEFSKRVILADANLDKVLSAYNKHRDKPIREQAENIIHLFTLTNLGAPAAFKYFDTTIDRKRYTSTKEVLDATLIHQSITGLYETRIDLSQLGGD

SEQ ID NO: 192 - protein, 1554 aa, Artificial Sequence
  Description of artificial sequence: 105 Cas9 TadAins 1068 polypeptide sequence
MDKKYSIGLAIGTNSVGWAVITDEYKVPSKKFKVLGNTDRHSIKKNLIGALLFDSGETAEATRLKRTARRRYTRRKNRICYLQEIFSNEMAKVDDSFFHRLEESFLVEEDKKHERHPIFGNIVDEVAYHEKYPTIYHLRKKLVDSTDKADLRLIYLALAHMIKFRGHFLIEGDLNPDNSDVDKLFIQLVQTYNQLFEENPINASGVDAKAILSARLSKSRRLENLIAQLPGEKKNGLFGNLIALSLGLTPNFKSNFDLAEDAKLQLSKDTYDDDLDNLLAQIGDQYADLFLAAKNLSDAILLSDILRVNTEITKAPLSASMIKRYDEHHQDLTLLKALVRQQLPEKYKEIFFDQSKNGYAGYIDGGASQEEFYKFIKPILEKMDGTEELLVKLNREDLLRKQRTFDNGSIPHQIHLGELHAILRRQEDFYPFLKDNREKIEKILTFRIPYYVGPLARGNSRFAWMTRKSEETITPWNFEEVVDKGASAQSFIERMTNFDKNLPNEKVLPKHSLLYEYFTVYNELTKVKYVTEGMRKPAFLSGEQKKAIVDLLFKTNRKVTVKQLKEDYFKKIECFDSVEISGVEDRFNASLGTYHDLLKIIKDKDFLDNEENEDILEDIVLTLTLFEDREMIEERLKTYAHLFDDKVMKQLKRRRYTGWGRLSRKLINGIRDKQSGKTILDFLKSDGFANRNFMQLIHDDSLTFKEDIQKAQVSGQGDSLHEHIANLAGSPAIKKGILQTVKVVDELVKVMGRHKPENIVIEMARENQTTQKGQKNSRERMKRIEEGIKELGSQILKEHPVENTQLQNEKLYLYYLQNGRDMYVDQELDINRLSDYDVDHIVPQSFLKDDSIDNKVLTRSDKNRGKSDNVPSEEVVKKMKNYWRQLLNAKLITQRKFDNLTKAERGGLSELDKAGFIKRQLVETRQITKHVAQILDSRMNTKYDENDKLIREVKVITLKSKLVSDFRKDFQFYKVREINNYHHAHDAYLNAVVGTALIKKYPKLESEFVYGDYKVYDVRKMIAKSEQEIGKATAKYFFYSNIMNFFKTEITLANGEIRKRPLIETNGEGSSGSETPGTSESATPESSGSEVEFSHEYWMRHALTLAKRARDEREVPVGAVLVLNNRVIGEGWNRAIGLHDPTAHAEIMALRQGGLVMQNYRLIDATLYVTFEPCVMCAGAMIHSRIGRVVFGVRNAKTGAAGSLMDVLHYPGMNHRVEITEGILADECAALLCYFFRMPRQVFNAQKKAQSSTDTGEIVWDKGRDFATVRKVLSMPQVNIVKKTEVQTGGFSKESILPKRNSDKLIARKKDWDPKKYGGFDSPTVAYSVLVVAKVEKGKSKKLKSVKELLGITIMERSSFEKNPIDFLEAKGYKEVKKDLIIKLPKYSLFELENGRKRMLASAGELQKGNELALPSKYVNFLYLASHYEKLKGSPEDNEQKQLFVEQHKHYLDEIIEQISEFSKRVILADANLDKVLSAYNKHRDKPIREQAENIIHLFTLTNLGAPAAFKYFDTTIDRKRYTSTKEVLDATLIHQSITGLYETRIDLSQLGGD

SEQ ID NO: 193 - protein, 1554 aa, Artificial Sequence
  Description of artificial sequence: 106 Cas9 TadAins 1247 polypeptide sequence
MDKKYSIGLAIGTNSVGWAVITDEYKVPSKKFKVLGNTDRHSIKKNLIGALLFDSGETAEATRLKRTARRRYTRRKNRICYLQEIFSNEMAKVDDSFFHRLEESFLVEEDKKHERHPIFGNIVDEVAYHEKYPTIYHLRKKLVDSTDKADLRLIYLALAHMIKFRGHFLIEGDLNPDNSDVDKLFIQLVQTYNQLFEENPINASGVDAKAILSARLSKSRRLENLIAQLPGEKKNGLFGNLIALSLGLTPNFKSNFDLAEDAKLQLSKDTYDDDLDNLLAQIGDQYADLFLAAKNLSDAILLSDILRVNTEITKAPLSASMIKRYDEHHQDLTLLKALVRQQLPEKYKEIFFDQSKNGYAGYIDGGASQEEFYKFIKPILEKMDGTEELLVKLNREDLLRKQRTFDNGSIPHQIHLGELHAILRRQEDFYPFLKDNREKIEKILTFRIPYYVGPLARGNSRFAWMTRKSEETITPWNFEEVVDKGASAQSFIERMTNFDKNLPNEKVLPKHSLLYEYFTVYNELTKVKYVTEGMRKPAFLSGEQKKAIVDLLFKTNRKVTVKQLKEDYFKKIECFDSVEISGVEDRFNASLGTYHDLLKIIKDKDFLDNEENEDILEDIVLTLTLFEDREMIEERLKTYAHLFDDKVMKQLKRRRYTGWGRLSRKLINGIRDKQSGKTILDFLKSDGFANRNFMQLIHDDSLTFKEDIQKAQVSGQGDSLHEHIANLAGSPAIKKGILQTVKVVDELVKVMGRHKPENIVIEMARENQTTQKGQKNSRERMKRIEEGIKELGSQILKEHPVENTQLQNEKLYLYYLQNGRDMYVDQELDINRLSDYDVDHIVPQSFLKDDSIDNKVLTRSDKNRGKSDNVPSEEVVKKMKNYWRQLLNAKLITQRKFDNLTKAERGGLSELDKAGFIKRQLVETRQITKHVAQILDSRMNTKYDENDKLIREVKVITLKSKLVSDFRKDFQFYKVREINNYHHAHDAYLNAVVGTALIKKYPKLESEFVYGDYKVYDVRKMIAKSEQEIGKATAKYFFYSNIMNFFKTEITLANGEIRKRPLIETNGETGEIVWDKGRDFATVRKVLSMPQVNIVKKTEVQTGGFSKESILPKRNSDKLIARKKDWDPKKYGGFDSPTVAYSVLVVAKVEKGKSKKLKSVKELLGITIMERSSFEKNPIDFLEAKGYKEVKKDLIIKLPKYSLFELENGRKRMLASAGELQKGNELALPSKYVNFLYLASHYEKLKGGSSGSETPGTSESATPESSGSEVEFSHEYWMRHALTLAKRARDEREVPVGAVLVLNNRVIGEGWNRAIGLHDPTAHAEIMALRQGGLVMQNYRLIDATLYVTFEPCVMCAGAMIHSRIGRVVFGVRNAKTGAAGSLMDVLHYPGMNHRVEITEGILADECAALLCYFFRMPRQVFNAQKKAQSSTDSPEDNEQKQLFVEQHKHYLDEIIEQISEFSKRVILADANLDKVLSAYNKHRDKPIREQAENIIHLFTLTNLGAPAAFKYFDTTIDRKRYTSTKEVLDATLIHQSITGLYETRIDLSQLGGD

SEQ ID NO: 194 - protein, 1554 aa, Artificial Sequence
  Description of artificial sequence: 107 Cas9 TadAins 1054 polypeptide sequence
MDKKYSIGLAIGTNSVGWAVITDEYKVPSKKFKVLGNTDRHSIKKNLIGALLFDSGETAEATRLKRTARRRYTRRKNRICYLQEIFSNEMAKVDDSFFHRLEESFLVEEDKKHERHPIFGNIVDEVAYHEKYPTIYHLRKKLVDSTDKADLRLIYLALAHMIKFRGHFLIEGDLNPDNSDVDKLFIQLVQTYNQLFEENPINASGVDAKAILSARLSKSRRLENLIAQLPGEKKNGLFGNLIALSLGLTPNFKSNFDLAEDAKLQLSKDTYDDDLDNLLAQIGDQYADLFLAAKNLSDAILLSDILRVNTEITKAPLSASMIKRYDEHHQDLTLLKALVRQQLPEKYKEIFFDQSKNGYAGYIDGGASQEEFYKFIKPILEKMDGTEELLVKLNREDLLRKQRTFDNGSIPHQIHLGELHAILRRQEDFYPFLKDNREKIEKILTFRIPYYVGPLARGNSRFAWMTRKSEETITPWNFEEVVDKGASAQSFIERMTNFDKNLPNEKVLPKHSLLYEYFTVYNELTKVKYVTEGMRKPAFLSGEQKKAIVDLLFKTNRKVTVKQLKEDYFKKIECFDSVEISGVEDRFNASLGTYHDLLKIIKDKDFLDNEENEDILEDIVLTLTLFEDREMIEERLKTYAHLFDDKVMKQLKRRRYTGWGRLSRKLINGIRDKQSGKTILDFLKSDGFANRNFMQLIHDDSLTFKEDIQKAQVSGQGDSLHEHIANLAGSPAIKKGILQTVKVVDELVKVMGRHKPENIVIEMARENQTTQKGQKNSRERMKRIEEGIKELGSQILKEHPVENTQLQNEKLYLYYLQNGRDMYVDQELDINRLSDYDVDHIVPQSFLKDDSIDNKVLTRSDKNRGKSDNVPSEEVVKKMKNYWRQLLNAKLITQRKFDNLTKAERGGLSELDKAGFIKRQLVETRQITKHVAQILDSRMNTKYDENDKLIREVKVITLKSKLVSDFRKDFQFYKVREINNYHHAHDAYLNAVVGTALIKKYPKLESEFVYGDYKVYDVRKMIAKSEQEIGKATAKYFFYSNIMNFFKTEITLANGSSGSETPGTSESATPESSGSEVEFSHEYWMRHALTLAKRARDEREVPVGAVLVLNNRVIGEGWNRAIGLHDPTAHAEIMALRQGGLVMQNYRLIDATLYVTFEPCVMCAGAMIHSRIGRVVFGVRNAKTGAAGSLMDVLHYPGMNHRVEITEGILADECAALLCYFFRMPRQVFNAQKKAQSSTDGEIRKRPLIETNGETGEIVWDKGRDFATVRKVLSMPQVNIVKKTEVQTGGFSKESILPKRNSDKLIARKKDWDPKKYGGFDSPTVAYSVLVVAKVEKGKSKKLKSVKELLGITIMERSSFEKNPIDFLEAKGYKEVKKDLIIKLPKYSLFELENGRKRMLASAGELQKGNELALPSKYVNFLYLASHYEKLKGSPEDNEQKQLFVEQHKHYLDEIIEQISEFSKRVILADANLDKVLSAYNKHRDKPIREQAENIIHLFTLTNLGAPAAFKYFDTTIDRKRYTSTKEVLDATLIHQSITGLYETRIDLSQLGGD

SEQ ID NO: 195 - protein, 1554 aa, Artificial Sequence
  Description of artificial sequence: 108 Cas9 TadAins 1026 polypeptide sequence
MDKKYSIGLAIGTNSVGWAVITDEYKVPSKKFKVLGNTDRHSIKKNLIGALLFDSGETAEATRLKRTARRRYTRRKNRICYLQEIFSNEMAKVDDSFFHRLEESFLVEEDKKHERHPIFGNIVDEVAYHEKYPTIYHLRKKLVDSTDKADLRLIYLALAHMIKFRGHFLIEGDLNPDNSDVDKLFIQLVQTYNQLFEENPINASGVDAKAILSARLSKSRRLENLIAQLPGEKKNGLFGNLIALSLGLTPNFKSNFDLAEDAKLQLSKDTYDDDLDNLLAQIGDQYADLFLAAKNLSDAILLSDILRVNTEITKAPLSASMIKRYDEHHQDLTLLKALVRQQLPEKYKEIFFDQSKNGYAGYIDGGASQEEFYKFIKPILEKMDGTEELLVKLNREDLLRKQRTFDNGSIPHQIHLGELHAILRRQEDFYPFLKDNREKIEKILTFRIPYYVGPLARGNSRFAWMTRKSEETITPWNFEEVVDKGASAQSFIERMTNFDKNLPNEKVLPKHSLLYEYFTVYNELTKVKYVTEGMRKPAFLSGEQKKAIVDLLFKTNRKVTVKQLKEDYFKKIECFDSVEISGVEDRFNASLGTYHDLLKIIKDKDFLDNEENEDILEDIVLTLTLFEDREMIEERLKTYAHLFDDKVMKQLKRRRYTGWGRLSRKLINGIRDKQSGKTILDFLKSDGFANRNFMQLIHDDSLTFKEDIQKAQVSGQGDSLHEHIANLAGSPAIKKGILQTVKVVDELVKVMGRHKPENIVIEMARENQTTQKGQKNSRERMKRIEEGIKELGSQILKEHPVENTQLQNEKLYLYYLQNGRDMYVDQELDINRLSDYDVDHIVPQSFLKDDSIDNKVLTRSDKNRGKSDNVPSEEVVKKMKNYWRQLLNAKLITQRKFDNLTKAERGGLSELDKAGFIKRQLVETRQITKHVAQILDSRMNTKYDENDKLIREVKVITLKSKLVSDFRKDFQFYKVREINNYHHAHDAYLNAVVGTALIKKYPKLESEFVYGDYKVYDVRKMIAKSEGSSGSETPGTSESATPESSGSEVEFSHEYWMRHALTLAKRARDEREVPVGAVLVLNNRVIGEGWNRAIGLHDPTAHAEIMALRQGGLVMQNYRLIDATLYVTFEPCVMCAGAMIHSRIGRVVFGVRNAKTGAAGSLMDVLHYPGMNHRVEITEGILADECAALLCYFFRMPRQVFNAQKKAQSSTDQEIGKATAKYFFYSNIMNFFKTEITLANGEIRKRPLIETNGETGEIVWDKGRDFATVRKVLSMPQVNIVKKTEVQTGGFSKESILPKRNSDKLIARKKDWDPKKYGGFDSPTVAYSVLVVAKVEKGKSKKLKSVKELLGITIMERSSFEKNPIDFLEAKGYKEVKKDLIIKLPKYSLFELENGRKRMLASAGELQKGNELALPSKYVNFLYLASHYEKLKGSPEDNEQKQLFVEQHKHYLDEIIEQISEFSKRVILADANLDKVLSAYNKHRDKPIREQAENIIHLFTLTNLGAPAAFKYFDTTIDRKRYTSTKEVLDATLIHQSITGLYETRIDLSQLGGD

SEQ ID NO: 196 - protein, 1540 aa, Artificial Sequence
  Description of artificial sequence: 109 Cas9 TadAins 768 polypeptide sequence
MDKKYSIGLAIGTNSVGWAVITDEYKVPSKKFKVLGNTDRHSIKKNLIGALLFDSGETAEATRLKRTARRRYTRRKNRICYLQEIFSNEMAKVDDSFFHRLEESFLVEEDKKHERHPIFGNIVDEVAYHEKYPTIYHLRKKLVDSTDKADLRLIYLALAHMIKFRGHFLIEGDLNPDNSDVDKLFIQLVQTYNQLFEENPINASGVDAKAILSARLSKSRRLENLIAQLPGEKKNGLFGNLIALSLGLTPNFKSNFDLAEDAKLQLSKDTYDDDLDNLLAQIGDQYADLFLAAKNLSDAILLSDILRVNTEITKAPLSASMIKRYDEHHQDLTLLKALVRQQLPEKYKEIFFDQSKNGYAGYIDGGASQEEFYKFIKPILEKMDGTEELLVKLNREDLLRKQRTFDNGSIPHQIHLGELHAILRRQEDFYPFLKDNREKIEKILTFRIPYYVGPLARGNSRFAWMTRKSEETITPWNFEEVVDKGASAQSFIERMTNFDKNLPNEKVLPKHSLLYEYFTVYNELTKVKYVTEGMRKPAFLSGEQKKAIVDLLFKTNRKVTVKQLKEDYFKKIECFDSVEISGVEDRFNASLGTYHDLLKIIKDKDFLDNEENEDILEDIVLTLTLFEDREMIEERLKTYAHLFDDKVMKQLKRRRYTGWGRLSRKLINGIRDKQSGKTILDFLKSDGFANRNFMQLIHDDSLTFKEDIQKAQVSGQGDSLHEHIANLAGSPAIKKGILQTVKVVDELVKVMGRHKPENIVIEMARENQGSSGSETPGTSESATPESSGSEVEFSHEYWMRHALTLAKRARDEREVPVGAVLVLNNRVIGEGWNRAIGLHDPTAHAEIMALRQGGLVMQNYRLIDATLYVTFEPCVMCAGAMIHSRIGRVVFGVRNAKTGAAGSLMDVLHYPGMNHRVEITEGILADECAALLCYFFRMPRTTQKGQKNSRERMKRIEEGIKELGSQILKEHPVENTQLQNEKLYLYYLQNGRDMYVDQELDINRLSDYDVDHIVPQSFLKDDSIDNKVLTRSDKNRGKSDNVPSEEVVKKMKNYWRQLLNAKLITQRKFDNLTKAERGGLSELDKAGFIKRQLVETRQITKHVAQILDSRMNTKYDENDKLIREVKVITLKSKLVSDFRKDFQFYKVREINNYHHAHDAYLNAVVGTALIKKYPKLESEFVYGDYKVYDVRKMIAKSEQEIGKATAKYFFYSNIMNFFKTEITLANGEIRKRPLIETNGETGEIVWDKGRDFATVRKVLSMPQVNIVKKTEVQTGGFSKESILPKRNSDKLIARKKDWDPKKYGGFDSPTVAYSVLVVAKVEKGKSKKLKSVKELLGITIMERSSFEKNPIDFLEAKGYKEVKKDLIIKLPKYSLFELENGRKRMLASAGELQKGNELALPSKYVNFLYLASHYEKLKGSPEDNEQKQLFVEQHKHYLDEIIEQISEFSKRVILADANLDKVLSAYNKHRDKPIREQAENIIHLFTLTNLGAPAAFKYFDTTIDRKRYTSTKEVLDATLIHQSITGLYETRIDLSQLGGD

SEQ ID NO: 197 - protein, 1540 aa, Artificial Sequence
  Description of artificial sequence: 110.1 Cas9 TadAins 1250 polypeptide sequence
MDKKYSIGLAIGTNSVGWAVITDEYKVPSKKFKVLGNTDRHSIKKNLIGALLFDSGETAEATRLKRTARRRYTRRKNRICYLQEIFSNEMAKVDDSFFHRLEESFLVEEDKKHERHPIFGNIVDEVAYHEKYPTIYHLRKKLVDSTDKADLRLIYLALAHMIKFRGHFLIEGDLNPDNSDVDKLFIQLVQTYNQLFEENPINASGVDAKAILSARLSKSRRLENLIAQLPGEKKNGLFGNLIALSLGLTPNFKSNFDLAEDAKLQLSKDTYDDDLDNLLAQIGDQYADLFLAAKNLSDAILLSDILRVNTEITKAPLSASMIKRYDEHHQDLTLLKALVRQQLPEKYKEIFFDQSKNGYAGYIDGGASQEEFYKFIKPILEKMDGTEELLVKLNREDLLRKQRTFDNGSIPHQIHLGELHAILRRQEDFYPFLKDNREKIEKILTFRIPYYVGPLARGNSRFAWMTRKSEETITPWNFEEVVDKGASAQSFIERMTNFDKNLPNEKVLPKHSLLYEYFTVYNELTKVKYVTEGMRKPAFLSGEQKKAIVDLLFKTNRKVTVKQLKEDYFKKIECFDSVEISGVEDRFNASLGTYHDLLKIIKDKDFLDNEENEDILEDIVLTLTLFEDREMIEERLKTYAHLFDDKVMKQLKRRRYTGWGRLSRKLINGIRDKQSGKTILDFLKSDGFANRNFMQLIHDDSLTFKEDIQKAQVSGQGDSLHEHIANLAGSPAIKKGILQTVKVVDELVKVMGRHKPENIVIEMARENQTTQKGQKNSRERMKRIEEGIKELGSQILKEHPVENTQLQNEKLYLYYLQNGRDMYVDQELDINRLSDYDVDHIVPQSFLKDDSIDNKVLTRSDKNRGKSDNVPSEEVVKKMKNYWRQLLNAKLITQRKFDNLTKAERGGLSELDKAGFIKRQLVETRQITKHVAQILDSRMNTKYDENDKLIREVKVITLKSKLVSDFRKDFQFYKVREINNYHHAHDAYLNAVVGTALIKKYPKLESEFVYGDYKVYDVRKMIAKSEQEIGKATAKYFFYSNIMNFFKTEITLANGEIRKRPLIETNGETGEIVWDKGRDFATVRKVLSMPQVNIVKKTEVQTGGFSKESILPKRNSDKLIARKKDWDPKKYGGFDSPTVAYSVLVVAKVEKGKSKKLKSVKELLGITIMERSSFEKNPIDFLEAKGYKEVKKDLIIKLPKYSLFELENGRKRMLASAGELQKGNELALPSKYVNFLYLASHYEKLKGSPGSSGSETPGTSESATPESSGSEVEFSHEYWMRHALTLAKRARDEREVPVGAVLVLNNRVIGEGWNRAIGLHDPTAHAEIMALRQGGLVMQNYRLIDATLYVTFEPCVMCAGAMIHSRIGRVVFGVRNAKTGAAGSLMDVLHYPGMNHRVEITEGILADECAALLCYFFRMPREDNEQKQLFVEQHKHYLDEIIEQISEFSKRVILADANLDKVLSAYNKHRDKPIREQAENIIHLFTLTNLGAPAAFKYFDTTIDRKRYTSTKEVLDATLIHQSITGLYETRIDLSQLGGD

SEQ ID NO: 198 - protein, 1543 aa, Artificial Sequence
  Description of artificial sequence: 110.2 Cas9 TadAins 1250 polypeptide sequence
MDKKYSIGLAIGTNSVGWAVITDEYKVPSKKFKVLGNTDRHSIKKNLIGALLFDSGETAEATRLKRTARRRYTRRKNRICYLQEIFSNEMAKVDDSFFHRLEESFLVEEDKKHERHPIFGNIVDEVAYHEKYPTIYHLRKKLVDSTDKADLRLIYLALAHMIKFRGHFLIEGDLNPDNSDVDKLFIQLVQTYNQLFEENPINASGVDAKAILSARLSKSRRLENLIAQLPGEKKNGLFGNLIALSLGLTPNFKSNFDLAEDAKLQLSKDTYDDDLDNLLAQIGDQYADLFLAAKNLSDAILLSDILRVNTEITKAPLSASMIKRYDEHHQDLTLLKALVRQQLPEKYKEIFFDQSKNGYAGYIDGGASQEEFYKFIKPILEKMDGTEELLVKLNREDLLRKQRTFDNGSIPHQIHLGELHAILRRQEDFYPFLKDNREKIEKILTFRIPYYVGPLARGNSRFAWMTRKSEETITPWNFEEVVDKGASAQSFIERMTNFDKNLPNEKVLPKHSLLYEYFTVYNELTKVKYVTEGMRKPAFLSGEQKKAIVDLLFKTNRKVTVKQLKEDYFKKIECFDSVEISGVEDRFNASLGTYHDLLKIIKDKDFLDNEENEDILEDIVLTLTLFEDREMIEERLKTYAHLFDDKVMKQLKRRRYTGWGRLSRKLINGIRDKQSGKTILDFLKSDGFANRNFMQLIHDDSLTFKEDIQKAQVSGQGDSLHEHIANLAGSPAIKKGILQTVKVVDELVKVMGRHKPENIVIEMARENQTTQKGQKNSRERMKRIEEGIKELGSQILKEHPVENTQLQNEKLYLYYLQNGRDMYVDQELDINRLSDYDVDHIVPQSFLKDDSIDNKVLTRSDKNRGKSDNVPSEEVVKKMKNYWRQLLNAKLITQRKFDNLTKAERGGLSELDKAGFIKRQLVETRQITKHVAQILDSRMNTKYDENDKLIREVKVITLKSKLVSDFRKDFQFYKVREINNYHHAHDAYLNAVVGTALIKKYPKLESEFVYGDYKVYDVRKMIAKSEQEIGKATAKYFFYSNIMNFFKTEITLANGEIRKRPLIETNGETGEIVWDKGRDFATVRKVLSMPQVNIVKKTEVQTGGFSKESILPKRNSDKLIARKKDWDPKKYGGFDSPTVAYSVLVVAKVEKGKSKKLKSVKELLGITIMERSSFEKNPIDFLEAKGYKEVKKDLIIKLPKYSLFELENGRKRMLASAGELQKGNELALPSKYVNFLYLASHYEKLKGSPGSSGSSGSETPGTSESATPESSGSEVEFSHEYWMRHALTLAKRARDEREVPVGAVLVLNNRVIGEGWNRAIGLHDPTAHAEIMALRQGGLVMQNYRLIDATLYVTFEPCVMCAGAMIHSRIGRVVFGVRNAKTGAAGSLMDVLHYPGMNHRVEITEGILADECAALLCYFFRMPREDNEQKQLFVEQHKHYLDEIIEQISEFSKRVILADANLDKVLSAYNKHRDKPIREQAENIIHLFTLTNLGAPAAFKYFDTTIDRKRYTSTKEVLDATLIHQSITGLYETRIDLSQLGGD

SEQ ID NO: 199 - protein, 1546 aa, Artificial Sequence
  Description of artificial sequence: 110.3 Cas9 TadAins 1250 polypeptide sequence
MDKKYSIGLAIGTNSVGWAVITDEYKVPSKKFKVLGNTDRHSIKKNLIGALLFDSGETAEATRLKRTARRRYTRRKNRICYLQEIFSNEMAKVDDSFFHRLEESFLVEEDKKHERHPIFGNIVDEVAYHEKYPTIYHLRKKLVDSTDKADLRLIYLALAHMIKFRGHFLIEGDLNPDNSDVDKLFIQLVQTYNQLFEENPINASGVDAKAILSARLSKSRRLENLIAQLPGEKKNGLFGNLIALSLGLTPNFKSNFDLAEDAKLQLSKDTYDDDLDNLLAQIGDQYADLFLAAKNLSDAILLSDILRVNTEITKAPLSASMIKRYDEHHQDLTLLKALVRQQLPEKYKEIFFDQSKNGYAGYIDGGASQEEFYKFIKPILEKMDGTEELLVKLNREDLLRKQRTFDNGSIPHQIHLGELHAILRRQEDFYPFLKDNREKIEKILTFRIPYYVGPLARGNSRFAWMTRKSEETITPWNFEEVVDKGASAQSFIERMTNFDKNLPNEKVLPKHSLLYEYFTVYNELTKVKYVTEGMRKPAFLSGEQKKAIVDLLFKTNRKVTVKQLKEDYFKKIECFDSVEISGVEDRFNASLGTYHDLLKIIKDKDFLDNEENEDILEDIVLTLTLFEDREMIEERLKTYAHLFDDKVMKQLKRRRYTGWGRLSRKLINGIRDKQSGKTILDFLKSDGFANRNFMQLIHDDSLTFKEDIQKAQVSGQGDSLHEHIANLAGSPAIKKGILQTVKVVDELVKVMGRHKPENIVIEMARENQTTQKGQKNSRERMKRIEEGIKELGSQILKEHPVENTQLQNEKLYLYYLQNGRDMYVDQELDINRLSDYDVDHIVPQSFLKDDSIDNKVLTRSDKNRGKSDNVPSEEVVKKMKNYWRQLLNAKLITQRKFDNLTKAERGGLSELDKAGFIKRQLVETRQITKHVAQILDSRMNTKYDENDKLIREVKVITLKSKLVSDFRKDFQFYKVREINNYHHAHDAYLNAVVGTALIKKYPKLESEFVYGDYKVYDVRKMIAKSEQEIGKATAKYFFYSNIMNFFKTEITLANGEIRKRPLIETNGETGEIVWDKGRDFATVRKVLSMPQVNIVKKTEVQTGGFSKESILPKRNSDKLIARKKDWDPKKYGGFDSPTVAYSVLVVAKVEKGKSKKLKSVKELLGITIMERSSFEKNPIDFLEAKGYKEVKKDLIIKLPKYSLFELENGRKRMLASAGELQKGNELALPSKYVNFLYLASHYEKLKGSPGSSGSSGSETPGTSESATPESGSSSGSEVEFSHEYWMRHALTLAKRARDEREVPVGAVLVLNNRVIGEGWNRAIGLHDPTAHAEIMALRQGGLVMQNYRLIDATLYVTFEPCVMCAGAMIHSRIGRVVFGVRNAKTGAAGSLMDVLHYPGMNHRVEITEGILADECAALLCYFFRMPREDNEQKQLFVEQHKHYLDEIIEQISEFSKRVILADANLDKVLSAYNKHRDKPIREQAENIIHLFTLTNLGAPAAFKYFDTTIDRKRYTSTKEVLDATLIHQSITGLYETRIDLSQLGGD

SEQ ID NO: 200 - protein, 1546 aa, Artificial Sequence
  Description of artificial sequence: 110.4 Cas9 TadAins 1250 polypeptide sequence
MDKKYSIGLAIGTNSVGWAVITDEYKVPSKKFKVLGNTDRHSIKKNLIGALLFDSGETAEATRLKRTARRRYTRRKNRICYLQEIFSNEMAKVDDSFFHRLEESFLVEEDKKHERHPIFGNIVDEVAYHEKYPTIYHLRKKLVDSTDKADLRLIYLALAHMIKFRGHFLIEGDLNPDNSDVDKLFIQLVQTYNQLFEENPINASGVDAKAILSARLSKSRRLENLIAQLPGEKKNGLFGNLIALSLGLTPNFKSNFDLAEDAKLQLSKDTYDDDLDNLLAQIGDQYADLFLAAKNLSDAILLSDILRVNTEITKAPLSASMIKRYDEHHQDLTLLKALVRQQLPEKYKEIFFDQSKNGYAGYIDGGASQEEFYKFIKPILEKMDGTEELLVKLNREDLLRKQRTFDNGSIPHQIHLGELHAILRRQEDFYPFLKDNREKIEKILTFRIPYYVGPLARGNSRFAWMTRKSEETITPWNFEEVVDKGASAQSFIERMTNFDKNLPNEKVLPKHSLLYEYFTVYNELTKVKYVTEGMRKPAFLSGEQKKAIVDLLFKTNRKVTVKQLKEDYFKKIECFDSVEISGVEDRFNASLGTYHDLLKIIKDKDFLDNEENEDILEDIVLTLTLFEDREMIEERLKTYAHLFDDKVMKQLKRRRYTGWGRLSRKLINGIRDKQSGKTILDFLKSDGFANRNFMQLIHDDSLTFKEDIQKAQVSGQGDSLHEHIANLAGSPAIKKGILQTVKVVDELVKVMGRHKPENIVIEMARENQTTQKGQKNSRERMKRIEEGIKELGSQILKEHPVENTQLQNEKLYLYYLQNGRDMYVDQELDINRLSDYDVDHIVPQSFLKDDSIDNKVLTRSDKNRGKSDNVPSEEVVKKMKNYWRQLLNAKLITQRKFDNLTKAERGGLSELDKAGFIKRQLVETRQITKHVAQILDSRMNTKYDENDKLIREVKVITLKSKLVSDFRKDFQFYKVREINNYHHAHDAYLNAVVGTALIKKYPKLESEFVYGDYKVYDVRKMIAKSEQEIGKATAKYFFYSNIMNFFKTEITLANGEIRKRPLIETNGETGEIVWDKGRDFATVRKVLSMPQVNIVKKTEVQTGGFSKESILPKRNSDKLIARKKDWDPKKYGGFDSPTVAYSVLVVAKVEKGKSKKLKSVKELLGITIMERSSFEKNPIDFLEAKGYKEVKKDLIIKLPKYSLFELENGRKRMLASAGELQKGNELALPSKYVNFLYLASHYEKLKGSPGSSGSSGSETPGTSESATPESGSSSGSEVEFSHEYWMRHALTLAKRARDEREVPVGAVLVLNNRVIGEGWNRAIGLHDPTAHAEIMALRQGGLVMQNYRLIDATLYVTFEPCVMCAGAMIHSRIGRVVFGVRNAKTGAAGSLMDVLHYPGMNHRVEITEGILADECAALLCYFFRMRREDNEQKQLFVEQHKHYLDEIIEQISEFSKRVILADANLDKVLSAYNKHRDKPIREQAENIIHLFTLTNLGAPAAFKYFDTTIDRKRYTSTKEVLDATLIHQSITGLYETRIDLSQLGGD

SEQ ID NO: 201 - protein, 1546 aa, Artificial Sequence
  Description of artificial sequence: 110.5 Cas9 TadAins 1249 polypeptide sequence
MDKKYSIGLAIGTNSVGWAVITDEYKVPSKKFKVLGNTDRHSIKKNLIGALLFDSGETAEATRLKRTARRRYTRRKNRICYLQEIFSNEMAKVDDSFFHRLEESFLVEEDKKHERHPIFGNIVDEVAYHEKYPTIYHLRKKLVDSTDKADLRLIYLALAHMIKFRGHFLIEGDLNPDNSDVDKLFIQLVQTYNQLFEENPINASGVDAKAILSARLSKSRRLENLIAQLPGEKKNGLFGNLIALSLGLTPNFKSNFDLAEDAKLQLSKDTYDDDLDNLLAQIGDQYADLFLAAKNLSDAILLSDILRVNTEITKAPLSASMIKRYDEHHQDLTLLKALVRQQLPEKYKEIFFDQSKNGYAGYIDGGASQEEFYKFIKPILEKMDGTEELLVKLNREDLLRKQRTFDNGSIPHQIHLGELHAILRRQEDFYPFLKDNREKIEKILTFRIPYYVGPLARGNSRFAWMTRKSEETITPWNFEEVVDKGASAQSFIERMTNFDKNLPNEKVLPKHSLLYEYFTVYNELTKVKYVTEGMRKPAFLSGEQKKAIVDLLFKTNRKVTVKQLKEDYFKKIECFDSVEISGVEDRFNASLGTYHDLLKIIKDKDFLDNEENEDILEDIVLTLTLFEDREMIEERLKTYAHLFDDKVMKQLKRRRYTGWGRLSRKLINGIRDKQSGKTILDFLKSDGFANRNFMQLIHDDSLTFKEDIQKAQVSGQGDSLHEHIANLAGSPAIKKGILQTVKVVDELVKVMGRHKPENIVIEMARENQTTQKGQKNSRERMKRIEEGIKELGSQILKEHPVENTQLQNEKLYLYYLQNGRDMYVDQELDINRLSDYDVDHIVPQSFLKDDSIDNKVLTRSDKNRGKSDNVPSEEVVKKMKNYWRQLLNAKLITQRKFDNLTKAERGGLSELDKAGFIKRQLVETRQITKHVAQILDSRMNTKYDENDKLIREVKVITLKSKLVSDFRKDFQFYKVREINNYHHAHDAYLNAVVGTALIKKYPKLESEFVYGDYKVYDVRKMIAKSEQEIGKATAKYFFYSNIMNFFKTEITLANGEIRKRPLIETNGETGEIVWDKGRDFATVRKVLSMPQVNIVKKTEVQTGGFSKESILPKRNSDKLIARKKDWDPKKYGGFDSPTVAYSVLVVAKVEKGKSKKLKSVKELLGITIMERSSFEKNPIDFLEAKGYKEVKKDLIIKLPKYSLFELENGRKRMLASAGELQKGNELALPSKYVNFLYLASHYEKLKGSGSSGSSGSETPGTSESATPESGSSSGSEVEFSHEYWMRHALTLAKRARDEREVPVGAVLVLNNRVIGEGWNRAIGLHDPTAHAEIMALRQGGLVMQNYRLIDATLYVTFEPCVMCAGAMIHSRIGRVVFGVRNAKTGAAGSLMDVLHYPGMNHRVEITEGILADECAALLCYFFRMRRPEDNEQKQLFVEQHKHYLDEIIEQISEFSKRVILADANLDKVLSAYNKHRDKPIREQAENIIHLFTLTNLGAPAAFKYFDTTIDRKRYTSTKEVLDATLIHQSITGLYETRIDLSQLGGD

SEQ ID NO: 202 - protein, 1551 aa, Artificial Sequence
  Description of artificial sequence: 110.5 Cas9 TadAins delta 59-66 1250 polypeptide sequence
MDKKYSIGLAIGTNSVGWAVITDEYKVPSKKFKVLGNTDRHSIKKNLIGALLFDSGETAEATRLKRTARRRYTRRKNRICYLQEIFSNEMAKVDDSFFHRLEESFLVEEDKKHERHPIFGNIVDEVAYHEKYPTIYHLRKKLVDSTDKADLRLIYLALAHMIKFRGHFLIEGDLNPDNSDVDKLFIQLVQTYNQLFEENPINASGVDAKAILSARLSKSRRLENLIAQLPGEKKNGLFGNLIALSLGLTPNFKSNFDLAEDAKLQLSKDTYDDDLDNLLAQIGDQYADLFLAAKNLSDAILLSDILRVNTEITKAPLSASMIKRYDEHHQDLTLLKALVRQQLPEKYKEIFFDQSKNGYAGYIDGGASQEEFYKFIKPILEKMDGTEELLVKLNREDLLRKQRTFDNGSIPHQIHLGELHAILRRQEDFYPFLKDNREKIEKILTFRIPYYVGPLARGNSRFAWMTRKSEETITPWNFEEVVDKGASAQSFIERMTNFDKNLPNEKVLPKHSLLYEYFTVYNELTKVKYVTEGMRKPAFLSGEQKKAIVDLLFKTNRKVTVKQLKEDYFKKIECFDSVEISGVEDRFNASLGTYHDLLKIIKDKDFLDNEENEDILEDIVLTLTLFEDREMIEERLKTYAHLFDDKVMKQLKRRRYTGWGRLSRKLINGIRDKQSGKTILDFLKSDGFANRNFMQLIHDDSLTFKEDIQKAQVSGQGDSLHEHIANLAGSPAIKKGILQTVKVVDELVKVMGRHKPENIVIEMARENQTTQKGQKNSRERMKRIEEGIKELGSQILKEHPVENTQLQNEKLYLYYLQNGRDMYVDQELDINRLSDYDVDHIVPQSFLKDDSIDNKVLTRSDKNRGKSDNVPSEEVVKKMKNYWRQLLNAKLITQRKFDNLTKAERGGLSELDKAGFIKRQLVETRQITKHVAQILDSRMNTKYDENDKLIREVKVITLKSKLVSDFRKDFQFYKVREINNYHHAHDAYLNAVVGTALIKKYPKLESEFVYGDYKVYDVRKMIAKSEQEIGKATAKYFFYSNIMNFFKTEITLANGEIRKRPLIETNGETGEIVWDKGRDFATVRKVLSMPQVNIVKKTEVQTGGFSKESILPKRNSDKLIARKKDWDPKKYGGFDSPTVAYSVLVVAKVEKGKSKKLKSVKELLGITIMERSSFEKNPIDFLEAKGYKEVKKDLIIKLPKYSLFELENGRKRMLASAGELQKGNELALPSKYVNFLYLASHYEKLKGSPGSSGSSGSETPGTSESATPESGSSGSEVEFSHEYWMRHALTLAKRARDEREVPVGAVLVLNNRVIGEGWNRAHAEIMALRQGGLVMQNYRLIDATLYVTFEPCVMCAGAMIHSRIGRVVFGVRNAKTGAAGSLMDVLHYPGMNHRVEITEGILADECAALLCYFFRMPRQVFNAQKKAQSSTDEDNEQKQLFVEQHKHYLDEIIEQISEFSKRVILADANLDKVLSAYNKHRDKPIREQAENIIHLFTLTNLGAPAAFKYFDTTIDRKRYTSTKEVLDATLIHQSITGLYETRIDLSQLGGD

SEQ ID NO: 203 - protein, 1546 aa, Artificial Sequence
  Description of artificial sequence: 110.6 Cas9 TadAins 1251 polypeptide sequence
MDKKYSIGLAIGTNSVGWAVITDEYKVPSKKFKVLGNTDRHSIKKNLIGALLFDSGETAEATRLKRTARRRYTRRKNRICYLQEIFSNEMAKVDDSFFHRLEESFLVEEDKKHERHPIFGNIVDEVAYHEKYPTIYHLRKKLVDSTDKADLRLIYLALAHMIKFRGHFLIEGDLNPDNSDVDKLFIQLVQTYNQLFEENPINASGVDAKAILSARLSKSRRLENLIAQLPGEKKNGLFGNLIALSLGLTPNFKSNFDLAEDAKLQLSKDTYDDDLDNLLAQIGDQYADLFLAAKNLSDAILLSDILRVNTEITKAPLSASMIKRYDEHHQDLTLLKALVRQQLPEKYKEIFFDQSKNGYAGYIDGGASQEEFYKFIKPILEKMDGTEELLVKLNREDLLRKQRTFDNGSIPHQIHLGELHAILRRQEDFYPFLKDNREKIEKILTFRIPYYVGPLARGNSRFAWMTRKSEETITPWNFEEVVDKGASAQSFIERMTNFDKNLPNEKVLPKHSLLYEYFTVYNELTKVKYVTEGMRKPAFLSGEQKKAIVDLLFKTNRKVTVKQLKEDYFKKIECFDSVEISGVEDRFNASLGTYHDLLKIIKDKDFLDNEENEDILEDIVLTLTLFEDREMIEERLKTYAHLFDDKVMKQLKRRRYTGWGRLSRKLINGIRDKQSGKTILDFLKSDGFANRNFMQLIHDDSLTFKEDIQKAQVSGQGDSLHEHIANLAGSPAIKKGILQTVKVVDELVKVMGRHKPENIVIEMARENQTTQKGQKNSRERMKRIEEGIKELGSQILKEHPVENTQLQNEKLYLYYLQNGRDMYVDQELDINRLSDYDVDHIVPQSFLKDDSIDNKVLTRSDKNRGKSDNVPSEEVVKKMKNYWRQLLNAKLITQRKFDNLTKAERGGLSELDKAGFIKRQLVETRQITKHVAQILDSRMNTKYDENDKLIREVKVITLKSKLVSDFRKDFQFYKVREINNYHHAHDAYLNAVVGTALIKKYPKLESEFVYGDYKVYDVRKMIAKSEQEIGKATAKYFFYSNIMNFFKTEITLANGEIRKRPLIETNGETGEIVWDKGRDFATVRKVLSMPQVNIVKKTEVQTGGFSKESILPKRNSDKLIARKKDWDPKKYGGFDSPTVAYSVLVVAKVEKGKSKKLKSVKELLGITIMERSSFEKNPIDFLEAKGYKEVKKDLIIKLPKYSLFELENGRKRMLASAGELQKGNELALPSKYVNFLYLASHYEKLKGSPEGSSGSSGSETPGTSESATPESGSSSGSEVEFSHEYWMRHALTLAKRARDEREVPVGAVLVLNNRVIGEGWNRAIGLHDPTAHAEIMALRQGGLVMQNYRLIDATLYVTFEPCVMCAGAMIHSRIGRVVFGVRNAKTGAAGSLMDVLHYPGMNHRVEITEGILADECAALLCYFFRMRRDNEQKQLFVEQHKHYLDEIIEQISEFSKRVILADANLDKVLSAYNKHRDKPIREQAENIIHLFTLTNLGAPAAFKYFDTTIDRKRYTSTKEVLDATLIHQSITGLYETRIDLSQLGGD

SEQ ID NO: 204 - protein, 1546 aa, Artificial Sequence
  Description of artificial sequence: 110.7 Cas9 TadAins 1252 polypeptide sequence
MDKKYSIGLAIGTNSVGWAVITDEYKVPSKKFKVLGNTDRHSIKKNLIGALLFDSGETAEATRLKRTARRRYTRRKNRICYLQEIFSNEMAKVDDSFFHRLEESFLVEEDKKHERHPIFGNIVDEVAYHEKYPTIYHLRKKLVDSTDKADLRLIYLALAHMIKFRGHFLIEGDLNPDNSDVDKLFIQLVQTYNQLFEENPINASGVDAKAILSARLSKSRRLENLIAQLPGEKKNGLFGNLIALSLGLTPNFKSNFDLAEDAKLQLSKDTYDDDLDNLLAQIGDQYADLFLAAKNLSDAILLSDILRVNTEITKAPLSASMIKRYDEHHQDLTLLKALVRQQLPEKYKEIFFDQSKNGYAGYIDGGASQEEFYKFIKPILEKMDGTEELLVKLNREDLLRKQRTFDNGSIPHQIHLGELHAILRRQEDFYPFLKDNREKIEKILTFRIPYYVGPLARGNSRFAWMTRKSEETITPWNFEEVVDKGASAQSFIERMTNFDKNLPNEKVLPKHSLLYEYFTVYNELTKVKYVTEGMRKPAFLSGEQKKAIVDLLFKTNRKVTVKQLKEDYFKKIECFDSVEISGVEDRFNASLGTYHDLLKIIKDKDFLDNEENEDILEDIVLTLTLFEDREMIEERLKTYAHLFDDKVMKQLKRRRYTGWGRLSRKLINGIRDKQSGKTILDFLKSDGFANRNFMQLIHDDSLTFKEDIQKAQVSGQGDSLHEHIANLAGSPAIKKGILQTVKVVDELVKVMGRHKPENIVIEMARENQTTQKGQKNSRERMKRIEEGIKELGSQILKEHPVENTQLQNEKLYLYYLQNGRDMYVDQELDINRLSDYDVDHIVPQSFLKDDSIDNKVLTRSDKNRGKSDNVPSEEVVKKMKNYWRQLLNAKLITQRKFDNLTKAERGGLSELDKAGFIKRQLVETRQITKHVAQILDSRMNTKYDENDKLIREVKVITLKSKLVSDFRKDFQFYKVREINNYHHAHDAYLNAVVGTALIKKYPKLESEFVYGDYKVYDVRKMIAKSEQEIGKATAKYFFYSNIMNFFKTEITLANGEIRKRPLIETNGETGEIVWDKGRDFATVRKVLSMPQVNIVKKTEVQTGGFSKESILPKRNSDKLIARKKDWDPKKYGGFDSPTVAYSVLVVAKVEKGKSKKLKSVKELLGITIMERSSFEKNPIDFLEAKGYKEVKKDLIIKLPKYSLFELENGRKRMLASAGELQKGNELALPSKYVNFLYLASHYEKLKGSPEDGSSGSSGSETPGTSESATPESGSSSGSEVEFSHEYWMRHALTLAKRARDEREVPVGAVLVLNNRVIGEGWNRAIGLHDPTAHAEIMALRQGGLVMQNYRLIDATLYVTFEPCVMCAGAMIHSRIGRVVFGVRNAKTGAAGSLMDVLHYPGMNHRVEITEGILADECAALLCYFFRMRRNEQKQLFVEQHKHYLDEIIEQISEFSKRVILADANLDKVLSAYNKHRDKPIREQAENIIHLFTLTNLGAPAAFKYFDTTIDRKRYTSTKEVLDATLIHQSITGLYETRIDLSQLGGD

SEQ ID NO: 205 - protein, 1533 aa, Artificial Sequence
  Description of artificial sequence: 110.8 Cas9 TadAins delta 59-66 C-truncate 1250 polypeptide sequence
MDKKYSIGLAIGTNSVGWAVITDEYKVPSKKFKVLGNTDRHSIKKNLIGALLFDSGETAEATRLKRTARRRYTRRKNRICYLQEIFSNEMAKVDDSFFHRLEESFLVEEDKKHERHPIFGNIVDEVAYHEKYPTIYHLRKKLVDSTDKADLRLIYLALAHMIKFRGHFLIEGDLNPDNSDVDKLFIQLVQTYNQLFEENPINASGVDAKAILSARLSKSRRLENLIAQLPGEKKNGLFGNLIALSLGLTPNFKSNFDLAEDAKLQLSKDTYDDDLDNLLAQIGDQYADLFLAAKNLSDAILLSDILRVNTEITKAPLSASMIKRYDEHHQDLTLLKALVRQQLPEKYKEIFFDQSKNGYAGYIDGGASQEEFYKFIKPILEKMDGTEELLVKLNREDLLRKQRTFDNGSIPHQIHLGELHAILRRQEDFYPFLKDNREKIEKILTFRIPYYVGPLARGNSRFAWMTRKSEETITPWNFEEVVDKGASAQSFIERMTNFDKNLPNEKVLPKHSLLYEYFTVYNELTKVKYVTEGMRKPAFLSGEQKKAIVDLLFKTNRKVTVKQLKEDYFKKIECFDSVEISGVEDRFNASLGTYHDLLKIIKDKDFLDNEENEDILEDIVLTLTLFEDREMIEERLKTYAHLFDDKVMKQLKRRRYTGWGRLSRKLINGIRDKQSGKTILDFLKSDGFANRNFMQLIHDDSLTFKEDIQKAQVSGQGDSLHEHIANLAGSPAIKKGILQTVKVVDELVKVMGRHKPENIVIEMARENQTTQKGQKNSRERMKRIEEGIKELGSQILKEHPVENTQLQNEKLYLYYLQNGRDMYVDQELDINRLSDYDVDHIVPQSFLKDDSIDNKVLTRSDKNRGKSDNVPSEEVVKKMKNYWRQLLNAKLITQRKFDNLTKAERGGLSELDKAGFIKRQLVETRQITKHVAQILDSRMNTKYDENDKLIREVKVITLKSKLVSDFRKDFQFYKVREINNYHHAHDAYLNAVVGTALIKKYPKLESEFVYGDYKVYDVRKMIAKSEQEIGKATAKYFFYSNIMNFFKTEITLANGEIRKRPLIETNGETGEIVWDKGRDFATVRKVLSMPQVNIVKKTEVQTGGFSKESILPKRNSDKLIARKKDWDPKKYGGFDSPTVAYSVLVVAKVEKGKSKKLKSVKELLGITIMERSSFEKNPIDFLEAKGYKEVKKDLIIKLPKYSLFELENGRKRMLASAGELQKGNELALPSKYVNFLYLASHYEKLKGSPGSSGSETPGTSESATPESSGSEVEFSHEYWMRHALTLAKRARDEREVPVGAVLVLNNRVIGEGWNRAHAEIMALRQGGLVMQNYRLIDATLYVTFEPCVMCAGAMIHSRIGRVVFGVRNAKTGAAGSLMDVLHYPGMNHRVEITEGILADECAALLCYFFRMPRQEDNEQKQLFVEQHKHYLDEIIEQISEFSKRVILADANLDKVLSAYNKHRDKPIREQAENIIHLFTLTNLGAPAAFKYFDTTIDRKRYTSTKEVLDATLIHQSITGLYETRIDLSQLGGD

SEQ ID NO: 206 - protein, 1549 aa, Artificial Sequence
  Description of artificial sequence: 111.1 Cas9 TadAins 997 polypeptide sequence
MDKKYSIGLAIGTNSVGWAVITDEYKVPSKKFKVLGNTDRHSIKKNLIGALLFDSGETAEATRLKRTARRRYTRRKNRICYLQEIFSNEMAKVDDSFFHRLEESFLVEEDKKHERHPIFGNIVDEVAYHEKYPTIYHLRKKLVDSTDKADLRLIYLALAHMIKFRGHFLIEGDLNPDNSDVDKLFIQLVQTYNQLFEENPINASGVDAKAILSARLSKSRRLENLIAQLPGEKKNGLFGNLIALSLGLTPNFKSNFDLAEDAKLQLSKDTYDDDLDNLLAQIGDQYADLFLAAKNLSDAILLSDILRVNTEITKAPLSASMIKRYDEHHQDLTLLKALVRQQLPEKYKEIFFDQSKNGYAGYIDGGASQEEFYKFIKPILEKMDGTEELLVKLNREDLLRKQRTFDNGSIPHQIHLGELHAILRRQEDFYPFLKDNREKIEKILTFRIPYYVGPLARGNSRFAWMTRKSEETITPWNFEEVVDKGASAQSFIERMTNFDKNLPNEKVLPKHSLLYEYFTVYNELTKVKYVTEGMRKPAFLSGEQKKAIVDLLFKTNRKVTVKQLKEDYFKKIECFDSVEISGVEDRFNASLGTYHDLLKIIKDKDFLDNEENEDILEDIVLTLTLFEDREMIEERLKTYAHLFDDKVMKQLKRRRYTGWGRLSRKLINGIRDKQSGKTILDFLKSDGFANRNFMQLIHDDSLTFKEDIQKAQVSGQGDSLHEHIANLAGSPAIKKGILQTVKVVDELVKVMGRHKPENIVIEMARENQTTQKGQKNSRERMKRIEEGIKELGSQILKEHPVENTQLQNEKLYLYYLQNGRDMYVDQELDINRLSDYDVDHIVPQSFLKDDSIDNKVLTRSDKNRGKSDNVPSEEVVKKMKNYWRQLLNAKLITQRKFDNLTKAERGGLSELDKAGFIKRQLVETRQITKHVAQILDSRMNTKYDENDKLIREVKVITLKSKLVSDFRKDFQFYKVREINNYHHAHDAYLNAVVGTALSHEYWMRHALTLAKRARDEREVPVGAVLVLNNRVIGEGWNRAIGLHDPTAHAEIMALRQGGLVMQNYRLIDATLYVTFEPCVMCAGAMIHSRIGRVVFGVRNAKTGAAGSLMDVLHYPGMNHRVEITEGILADECAALLCYFFRMPRQVFNAQKKAQSSTDGSSGSETPGTSESATPESSGIKKYPKLESEFVYGDYKVYDVRKMIAKSEQEIGKATAKYFFYSNIMNFFKTEITLANGEIRKRPLIETNGETGEIVWDKGRDFATVRKVLSMPQVNIVKKTEVQTGGFSKESILPKRNSDKLIARKKDWDPKKYGGFDSPTVAYSVLVVAKVEKGKSKKLKSVKELLGITIMERSSFEKNPIDFLEAKGYKEVKKDLIIKLPKYSLFELENGRKRMLASAGELQKGNELALPSKYVNFLYLASHYEKLKGSPEDNEQKQLFVEQHKHYLDEIIEQISEFSKRVILADANLDKVLSAYNKHRDKPIREQAENIIHLFTLTNLGAPAAFKYFDTTIDRKRYTSTKEVLDATLIHQSITGLYETRIDLSQLGGD

SEQ ID NO: 207 - protein, 1555 aa, Artificial Sequence
  Description of artificial sequence: 111.2 Cas9 TadAins 997 polypeptide sequence
MDKKYSIGLAIGTNSVGWAVITDEYKVPSKKFKVLGNTDRHSIKKNLIGALLFDSGETAEATRLKRTARRRYTRRKNRICYLQEIFSNEMAKVDDSFFHRLEESFLVEEDKKHERHPIFGNIVDEVAYHEKYPTIYHLRKKLVDSTDKADLRLIYLALAHMIKFRGHFLIEGDLNPDNSDVDKLFIQLVQTYNQLFEENPINASGVDAKAILSARLSKSRRLENLIAQLPGEKKNGLFGNLIALSLGLTPNFKSNFDLAEDAKLQLSKDTYDDDLDNLLAQIGDQYADLFLAAKNLSDAILLSDILRVNTEITKAPLSASMIKRYDEHHQDLTLLKALVRQQLPEKYKEIFFDQSKNGYAGYIDGGASQEEFYKFIKPILEKMDGTEELLVKLNREDLLRKQRTFDNGSIPHQIHLGELHAILRRQEDFYPFLKDNREKIEKILTFRIPYYVGPLARGNSRFAWMTRKSEETITPWNFEEVVDKGASAQSFIERMTNFDKNLPNEKVLPKHSLLYEYFTVYNELTKVKYVTEGMRKPAFLSGEQKKAIVDLLFKTNRKVTVKQLKEDYFKKIECFDSVEISGVEDRFNASLGTYHDLLKIIKDKDFLDNEENEDILEDIVLTLTLFEDREMIEERLKTYAHLFDDKVMKQLKRRRYTGWGRLSRKLINGIRDKQSGKTILDFLKSDGFANRNFMQLIHDDSLTFKEDIQKAQVSGQGDSLHEHIANLAGSPAIKKGILQTVKVVDELVKVMGRHKPENIVIEMARENQTTQKGQKNSRERMKRIEEGIKELGSQILKEHPVENTQLQNEKLYLYYLQNGRDMYVDQELDINRLSDYDVDHIVPQSFLKDDSIDNKVLTRSDKNRGKSDNVPSEEVVKKMKNYWRQLLNAKLITQRKFDNLTKAERGGLSELDKAGFIKRQLVETRQITKHVAQILDSRMNTKYDENDKLIREVKVITLKSKLVSDFRKDFQFYKVREINNYHHAHDAYLNAVVGTALSHEYWMRHALTLAKRARDEREVPVGAVLVLNNRVIGEGWNRAIGLHDPTAHAEIMALRQGGLVMQNYRLIDATLYVTFEPCVMCAGAMIHSRIGRVVFGVRNAKTGAAGSLMDVLHYPGMNHRVEITEGILADECAALLCYFFRMPRQVFNAQKKAQSSTDGSSGSSGSETPGTSESATPESSGGSSIKKYPKLESEFVYGDYKVYDVRKMIAKSEQEIGKATAKYFFYSNIMNFFKTEITLANGEIRKRPLIETNGETGEIVWDKGRDFATVRKVLSMPQVNIVKKTEVQTGGFSKESILPKRNSDKLIARKKDWDPKKYGGFDSPTVAYSVLVVAKVEKGKSKKLKSVKELLGITIMERSSFEKNPIDFLEAKGYKEVKKDLIIKLPKYSLFELENGRKRMLASAGELQKGNELALPSKYVNFLYLASHYEKLKGSPEDNEQKQLFVEQHKHYLDEIIEQISEFSKRVILADANLDKVLSAYNKHRDKPIREQAENIIHLFTLTNLGAPAAFKYFDTTIDRKRYTSTKEVLDATLIHQSITGLYETRIDLSQLGGD

SEQ ID NO: 208 - protein, 1421 aa, Artificial Sequence
  Description of artificial sequence: 112 delta HNH TadA polypeptide sequence
MDKKYSIGLAIGTNSVGWAVITDEYKVPSKKFKVLGNTDRHSIKKNLIGALLFDSGETAEATRLKRTARRRYTRRKNRICYLQEIFSNEMAKVDDSFFHRLEESFLVEEDKKHERHPIFGNIVDEVAYHEKYPTIYHLRKKLVDSTDKADLRLIYLALAHMIKFRGHFLIEGDLNPDNSDVDKLFIQLVQTYNQLFEENPINASGVDAKAILSARLSKSRRLENLIAQLPGEKKNGLFGNLIALSLGLTPNFKSNFDLAEDAKLQLSKDTYDDDLDNLLAQIGDQYADLFLAAKNLSDAILLSDILRVNTEITKAPLSASMIKRYDEHHQDLTLLKALVRQQLPEKYKEIFFDQSKNGYAGYIDGGASQEEFYKFIKPILEKMDGTEELLVKLNREDLLRKQRTFDNGSIPHQIHLGELHAILRRQEDFYPFLKDNREKIEKILTFRIPYYVGPLARGNSRFAWMTRKSEETITPWNFEEVVDKGASAQSFIERMTNFDKNLPNEKVLPKHSLLYEYFTVYNELTKVKYVTEGMRKPAFLSGEQKKAIVDLLFKTNRKVTVKQLKEDYFKKIECFDSVEISGVEDRFNASLGTYHDLLKIIKDKDFLDNEENEDILEDIVLTLTLFEDREMIEERLKTYAHLFDDKVMKQLKRRRYTGWGRLSRKLINGIRDKQSGKTILDFLKSDGFANRNFMQLIHDDSLTFKEDIQKAQVSGQGDSLHEHIANLAGSPAIKKGILQTVKVVDELVKVMGRHKPENIVIEMARENQTTQKGQKNSRERMKRIEEGIKELGSEVEFSHEYWMRHALTLAKRARDEREVPVGAVLVLNNRVIGEGWNRAIGLHDPTAHAEIMALRQGGLVMQNYRLIDATLYVTFEPCVMCAGAMIHSRIGRVVFGVRNAKTGAAGSLMDVLHYPGMNHRVEITEGILADECAALLCYFFRMPRQVFNAQKKAQSSTDGGLSELDKAGFIKRQLVETRQITKHVAQILDSRMNTKYDENDKLIREVKVITLKSKLVSDFRKDFQFYKVREINNYHHAHDAYLNAVVGTALIKKYPKLESEFVYGDYKVYDVRKMIAKSEQEIGKATAKYFFYSNIMNFFKTEITLANGEIRKRPLIETNGETGEIVWDKGRDFATVRKVLSMPQVNIVKKTEVQTGGFSKESILPKRNSDKLIARKKDWDPKKYGGFDSPTVAYSVLVVAKVEKGKSKKLKSVKELLGITIMERSSFEKNPIDFLEAKGYKEVKKDLIIKLPKYSLFELENGRKRMLASAGELQKGNELALPSKYVNFLYLASHYEKLKGSPEDNEQKQLFVEQHKHYLDEIIEQISEFSKRVILADANLDKVLSAYNKHRDKPIREQAENIIHLFTLTNLGAPAAFKYFDTTIDRKRYTSTKEVLDATLIHQSITGLYETRIDLSQLGGD

SEQ ID NO: 209 - protein, 1552 aa, Artificial Sequence
  Description of artificial sequence: 113 N-term single TadA helix trunc 165-end polypeptide sequence
MSEVEFSHEYWMRHALTLAKRARDEREVPVGAVLVLNNRVIGEGWNRAIGLHDPTAHAEIMALRQGGLVMQNYRLIDATLYVTFEPCVMCAGAMIHSRIGRVVFGVRNAKTGAAGSLMDVLHYPGMNHRVEITEGILADECAALLCYFFRMPRSGGSSGGSSGSETPGTSESATPESSGGSSGGSDKKYSIGLAIGTNSVGWAVITDEYKVPSKKFKVLGNTDRHSIKKNLIGALLFDSGETAEATRLKRTARRRYTRRKNRICYLQEIFSNEMAKVDDSFFHRLEESFLVEEDKKHERHPIFGNIVDEVAYHEKYPTIYHLRKKLVDSTDKADLRLIYLALAHMIKFRGHFLIEGDLNPDNSDVDKLFIQLVQTYNQLFEENPINASGVDAKAILSARLSKSRRLENLIAQLPGEKKNGLFGNLIALSLGLTPNFKSNFDLAEDAKLQLSKDTYDDDLDNLLAQIGDQYADLFLAAKNLSDAILLSDILRVNTEITKAPLSASMIKRYDEHHQDLTLLKALVRQQLPEKYKEIFFDQSKNGYAGYIDGGASQEEFYKFIKPILEKMDGTEELLVKLNREDLLRKQRTFDNGSIPHQIHLGELHAILRRQEDFYPFLKDNREKIEKILTFRIPYYVGPLARGNSRFAWMTRKSEETITPWNFEEVVDKGASAQSFIERMTNFDKNLPNEKVLPKHSLLYEYFTVYNELTKVKYVTEGMRKPAFLSGEQKKAIVDLLFKTNRKVTVKQLKEDYFKKIECFDSVEISGVEDRFNASLGTYHDLLKIIKDKDFLDNEENEDILEDIVLTLTLFEDREMIEERLKTYAHLFDDKVMKQLKRRRYTGWGRLSRKLINGIRDKQSGKTILDFLKSDGFANRNFMQLIHDDSLTFKEDIQKAQVSGQGDSLHEHIANLAGSPAIKKGILQTVKVVDELVKVMGRHKPENIVIEMARENQTTQKGQKNSRERMKRIEEGIKELGSQILKEHPVENTQLQNEKLYLYYLQNGRDMYVDQELDINRLSDYDVDHIVPQSFLKDDSIDNKVLTRSDKNRGKSDNVPSEEVVKKMKNYWRQLLNAKLITQRKFDNLTKAERGGLSELDKAGFIKRQLVETRQITKHVAQILDSRMNTKYDENDKLIREVKVITLKSKLVSDFRKDFQFYKVREINNYHHAHDAYLNAVVGTALIKKYPKLESEFVYGDYKVYDVRKMIAKSEQEIGKATAKYFFYSNIMNFFKTEITLANGEIRKRPLIETNGETGEIVWDKGRDFATVRKVLSMPQVNIVKKTEVQTGGFSKESILPKRNSDKLIARKKDWDPKKYGGFDSPTVAYSVLVVAKVEKGKSKKLKSVKELLGITIMERSSFEKNPIDFLEAKGYKEVKKDLIIKLPKYSLFELENGRKRMLASAGELQKGNELALPSKYVNFLYLASHYEKLKGSPEDNEQKQLFVEQHKHYLDEIIEQISEFSKRVILADANLDKVLSAYNKHRDKPIREQAENIIHLFTLTNLGAPAAFKYFDTTIDRKRYTSTKEVLDATLIHQSITGLYETRIDLSQLGGD

SEQ ID NO: 210 - protein, 1545 aa, Artificial Sequence
  Description of artificial sequence: 114 N-term single TadA helix trunc 165-end delta 59-65 polypeptide sequence
MSEVEFSHEYWMRHALTLAKRARDEREVPVGAVLVLNNRVIGEGWNRTAHAEIMALRQGGLVMQNYRLIDATLYVTFEPCVMCAGAMIHSRIGRVVFGVRNAKTGAAGSLMDVLHYPGMNHRVEITEGILADECAALLCYFFRMPRSGGSSGGSSGSETPGTSESATPESSGGSSGGSDKKYSIGLAIGTNSVGWAVITDEYKVPSKKFKVLGNTDRHSIKKNLIGALLFDSGETAEATRLKRTARRRYTRRKNRICYLQEIFSNEMAKVDDSFFHRLEESFLVEEDKKHERHPIFGNIVDEVAYHEKYPTIYHLRKKLVDSTDKADLRLIYLALAHMIKFRGHFLIEGDLNPDNSDVDKLFIQLVQTYNQLFEENPINASGVDAKAILSARLSKSRRLENLIAQLPGEKKNGLFGNLIALSLGLTPNFKSNFDLAEDAKLQLSKDTYDDDLDNLLAQIGDQYADLFLAAKNLSDAILLSDILRVNTEITKAPLSASMIKRYDEHHQDLTLLKALVRQQLPEKYKEIFFDQSKNGYAGYIDGGASQEEFYKFIKPILEKMDGTEELLVKLNREDLLRKQRTFDNGSIPHQIHLGELHAILRRQEDFYPFLKDNREKIEKILTFRIPYYVGPLARGNSRFAWMTRKSEETITPWNFEEVVDKGASAQSFIERMTNFDKNLPNEKVLPKHSLLYEYFTVYNELTKVKYVTEGMRKPAFLSGEQKKAIVDLLFKTNRKVTVKQLKEDYFKKIECFDSVEISGVEDRFNASLGTYHDLLKIIKDKDFLDNEENEDILEDIVLTLTLFEDREMIEERLKTYAHLFDDKVMKQLKRRRYTGWGRLSRKLINGIRDKQSGKTILDFLKSDGFANRNFMQLIHDDSLTFKEDIQKAQVSGQGDSLHEHIANLAGSPAIKKGILQTVKVVDELVKVMGRHKPENIVIEMARENQTTQKGQKNSRERMKRIEEGIKELGSQILKEHPVENTQLQNEKLYLYYLQNGRDMYVDQELDINRLSDYDVDHIVPQSFLKDDSIDNKVLTRSDKNRGKSDNVPSEEVVKKMKNYWRQLLNAKLITQRKFDNLTKAERGGLSELDKAGFIKRQLVETRQITKHVAQILDSRMNTKYDENDKLIREVKVITLKSKLVSDFRKDFQFYKVREINNYHHAHDAYLNAVVGTALIKKYPKLESEFVYGDYKVYDVRKMIAKSEQEIGKATAKYFFYSNIMNFFKTEITLANGEIRKRPLIETNGETGEIVWDKGRDFATVRKVLSMPQVNIVKKTEVQTGGFSKESILPKRNSDKLIARKKDWDPKKYGGFDSPTVAYSVLVVAKVEKGKSKKLKSVKELLGITIMERSSFEKNPIDFLEAKGYKEVKKDLIIKLPKYSLFELENGRKRMLASAGELQKGNELALPSKYVNFLYLASHYEKLKGSPEDNEQKQLFVEQHKHYLDEIIEQISEFSKRVILADANLDKVLSAYNKHRDKPIREQAENIIHLFTLTNLGAPAAFKYFDTTIDRKRYTSTKEVLDATLIHQSITGLYETRIDLSQLGGD

SEQ ID NO: 211 - protein, 1541 aa, Artificial Sequence
  Description of artificial sequence: 115.1 Cas9 TadAins1004 polypeptide sequence
MDKKYSIGLAIGTNSVGWAVITDEYKVPSKKFKVLGNTDRHSIKKNLIGALLFDSGETAEATRLKRTARRRYTRRKNRICYLQEIFSNEMAKVDDSFFHRLEESFLVEEDKKHERHPIFGNIVDEVAYHEKYPTIYHLRKKLVDSTDKADLRLIYLALAHMIKFRGHFLIEGDLNPDNSDVDKLFIQLVQTYNQLFEENPINASGVDAKAILSARLSKSRRLENLIAQLPGEKKNGLFGNLIALSLGLTPNFKSNFDLAEDAKLQLSKDTYDDDLDNLLAQIGDQYADLFLAAKNLSDAILLSDILRVNTEITKAPLSASMIKRYDEHHQDLTLLKALVRQQLPEKYKEIFFDQSKNGYAGYIDGGASQEEFYKFIKPILEKMDGTEELLVKLNREDLLRKQRTFDNGSIPHQIHLGELHAILRRQEDFYPFLKDNREKIEKILTFRIPYYVGPLARGNSRFAWMTRKSEETITPWNFEEVVDKGASAQSFIERMTNFDKNLPNEKVLPKHSLLYEYFTVYNELTKVKYVTEGMRKPAFLSGEQKKAIVDLLFKTNRKVTVKQLKEDYFKKIECFDSVEISGVEDRFNASLGTYHDLLKIIKDKDFLDNEENEDILEDIVLTLTLFEDREMIEERLKTYAHLFDDKVMKQLKRRRYTGWGRLSRKLINGIRDKQSGKTILDFLKSDGFANRNFMQLIHDDSLTFKEDIQKAQVSGQGDSLHEHIANLAGSPAIKKGILQTVKVVDELVKVMGRHKPENIVIEMARENQTTQKGQKNSRERMKRIEEGIKELGSQILKEHPVENTQLQNEKLYLYYLQNGRDMYVDQELDINRLSDYDVDHIVPQSFLKDDSIDNKVLTRSDKNRGKSDNVPSEEVVKKMKNYWRQLLNAKLITQRKFDNLTKAERGGLSELDKAGFIKRQLVETRQITKHVAQILDSRMNTKYDENDKLIREVKVITLKSKLVSDFRKDFQFYKVREINNYHHAHDAYLNAVVGTALIKKYPKGSSGSETPGTSESATPESSGSEVEFSHEYWMRHALTLAKRARDEREVPVGAVLVLNNRVIGEGWNRAIGLHDPTAHAEIMALRQGGLVMQNYRLIDATLYVTFEPCVMCAGAMIHSRIGRVVFGVRNAKTGAAGSLMDVLHYPGMNHRVEITEGILADECAALLCYFFRMPRQLESEFVYGDYKVYDVRKMIAKSEQEIGKATAKYFFYSNIMNFFKTEITLANGEIRKRPLIETNGETGEIVWDKGRDFATVRKVLSMPQVNIVKKTEVQTGGFSKESILPKRNSDKLIARKKDWDPKKYGGFDSPTVAYSVLVVAKVEKGKSKKLKSVKELLGITIMERSSFEKNPIDFLEAKGYKEVKKDLIIKLPKYSLFELENGRKRMLASAGELQKGNELALPSKYVNFLYLASHYEKLKGSPEDNEQKQLFVEQHKHYLDEIIEQISEFSKRVILADANLDKVLSAYNKHRDKPIREQAENIIHLFTLTNLGAPAAFKYFDTTIDRKRYTSTKEVLDATLIHQSITGLYETRIDLSQLGGD

SEQ ID NO: 212 - protein, 1541 aa, Artificial Sequence
  Description of artificial sequence: 115.2 Cas9 TadAins1005 polypeptide sequence
MDKKYSIGLAIGTNSVGWAVITDEYKVPSKKFKVLGNTDRHSIKKNLIGALLFDSGETAEATRLKRTARRRYTRRKNRICYLQEIFSNEMAKVDDSFFHRLEESFLVEEDKKHERHPIFGNIVDEVAYHEKYPTIYHLRKKLVDSTDKADLRLIYLALAHMIKFRGHFLIEGDLNPDNSDVDKLFIQLVQTYNQLFEENPINASGVDAKAILSARLSKSRRLENLIAQLPGEKKNGLFGNLIALSLGLTPNFKSNFDLAEDAKLQLSKDTYDDDLDNLLAQIGDQYADLFLAAKNLSDAILLSDILRVNTEITKAPLSASMIKRYDEHHQDLTLLKALVRQQLPEKYKEIFFDQSKNGYAGYIDGGASQEEFYKFIKPILEKMDGTEELLVKLNREDLLRKQRTFDNGSIPHQIHLGELHAILRRQEDFYPFLKDNREKIEKILTFRIPYYVGPLARGNSRFAWMTRKSEETITPWNFEEVVDKGASAQSFIERMTNFDKNLPNEKVLPKHSLLYEYFTVYNELTKVKYVTEGMRKPAFLSGEQKKAIVDLLFKTNRKVTVKQLKEDYFKKIECFDSVEISGVEDRFNASLGTYHDLLKIIKDKDFLDNEENEDILEDIVLTLTLFEDREMIEERLKTYAHLFDDKVMKQLKRRRYTGWGRLSRKLINGIRDKQSGKTILDFLKSDGFANRNFMQLIHDDSLTFKEDIQKAQVSGQGDSLHEHIANLAGSPAIKKGILQTVKVVDELVKVMGRHKPENIVIEMARENQTTQKGQKNSRERMKRIEEGIKELGSQILKEHPVENTQLQNEKLYLYYLQNGRDMYVDQELDINRLSDYDVDHIVPQSFLKDDSIDNKVLTRSDKNRGKSDNVPSEEVVKKMKNYWRQLLNAKLITQRKFDNLTKAERGGLSELDKAGFIKRQLVETRQITKHVAQILDSRMNTKYDENDKLIREVKVITLKSKLVSDFRKDFQFYKVREINNYHHAHDAYLNAVVGTALIKKYPKLGSSGSETPGTSESATPESSGSEVEFSHEYWMRHALTLAKRARDEREVPVGAVLVLNNRVIGEGWNRAIGLHDPTAHAEIMALRQGGLVMQNYRLIDATLYVTFEPCVMCAGAMIHSRIGRVVFGVRNAKTGAAGSLMDVLHYPGMNHRVEITEGILADECAALLCYFFRMPRQESEFVYGDYKVYDVRKMIAKSEQEIGKATAKYFFYSNIMNFFKTEITLANGEIRKRPLIETNGETGEIVWDKGRDFATVRKVLSMPQVNIVKKTEVQTGGFSKESILPKRNSDKLIARKKDWDPKKYGGFDSPTVAYSVLVVAKVEKGKSKKLKSVKELLGITIMERSSFEKNPIDFLEAKGYKEVKKDLIIKLPKYSLFELENGRKRMLASAGELQKGNELALPSKYVNFLYLASHYEKLKGSPEDNEQKQLFVEQHKHYLDEIIEQISEFSKRVILADANLDKVLSAYNKHRDKPIREQAENIIHLFTLTNLGAPAAFKYFDTTIDRKRYTSTKEVLDATLIHQSITGLYETRIDLSQLGGD

SEQ ID NO: 213 - protein, 1541 aa, Artificial Sequence
  Description of artificial sequence: 115.3 Cas9 TadAins1006 polypeptide sequence
MDKKYSIGLAIGTNSVGWAVITDEYKVPSKKFKVLGNTDRHSIKKNLIGALLFDSGETAEATRLKRTARRRYTRRKNRICYLQEIFSNEMAKVDDSFFHRLEESFLVEEDKKHERHPIFGNIVDEVAYHEKYPTIYHLRKKLVDSTDKADLRLIYLALAHMIKFRGHFLIEGDLNPDNSDVDKLFIQLVQTYNQLFEENPINASGVDAKAILSARLSKSRRLENLIAQLPGEKKNGLFGNLIALSLGLTPNFKSNFDLAEDAKLQLSKDTYDDDLDNLLAQIGDQYADLFLAAKNLSDAILLSDILRVNTEITKAPLSASMIKRYDEHHQDLTLLKALVRQQLPEKYKEIFFDQSKNGYAGYIDGGASQEEFYKFIKPILEKMDGTEELLVKLNREDLLRKQRTFDNGSIPHQIHLGELHAILRRQEDFYPFLKDNREKIEKILTFRIPYYVGPLARGNSRFAWMTRKSEETITPWNFEEVVDKGASAQSFIERMTNFDKNLPNEKVLPKHSLLYEYFTVYNELTKVKYVTEGMRKPAFLSGEQKKAIVDLLFKTNRKVTVKQLKEDYFKKIECFDSVEISGVEDRFNASLGTYHDLLKIIKDKDFLDNEENEDILEDIVLTLTLFEDREMIEERLKTYAHLFDDKVMKQLKRRRYTGWGRLSRKLINGIRDKQSGKTILDFLKSDGFANRNFMQLIHDDSLTFKEDIQKAQVSGQGDSLHEHIANLAGSPAIKKGILQTVKVVDELVKVMGRHKPENIVIEMARENQTTQKGQKNSRERMKRIEEGIKELGSQILKEHPVENTQLQNEKLYLYYLQNGRDMYVDQELDINRLSDYDVDHIVPQSFLKDDSIDNKVLTRSDKNRGKSDNVPSEEVVKKMKNYWRQLLNAKLITQRKFDNLTKAERGGLSELDKAGFIKRQLVETRQITKHVAQILDSRMNTKYDENDKLIREVKVITLKSKLVSDFRKDFQFYKVREINNYHHAHDAYLNAVVGTALIKKYPKLEGSSGSETPGTSESATPESSGSEVEFSHEYWMRHALTLAKRARDEREVPVGAVLVLNNRVIGEGWNRAIGLHDPTAHAEIMALRQGGLVMQNYRLIDATLYVTFEPCVMCAGAMIHSRIGRVVFGVRNAKTGAAGSLMDVLHYPGMNHRVEITEGILADECAALLCYFFRMPRQSEFVYGDYKVYDVRKMIAKSEQEIGKATAKYFFYSNIMNFFKTEITLANGEIRKRPLIETNGETGEIVWDKGRDFATVRKVLSMPQVNIVKKTEVQTGGFSKESILPKRNSDKLIARKKDWDPKKYGGFDSPTVAYSVLVVAKVEKGKSKKLKSVKELLGITIMERSSFEKNPIDFLEAKGYKEVKKDLIIKLPKYSLFELENGRKRMLASAGELQKGNELALPSKYVNFLYLASHYEKLKGSPEDNEQKQLFVEQHKHYLDEIIEQISEFSKRVILADANLDKVLSAYNKHRDKPIREQAENIIHLFTLTNLGAPAAFKYFDTTIDRKRYTSTKEVLDATLIHQSITGLYETRIDLSQLGGD

SEQ ID NO: 214 - protein, 1541 aa, Artificial Sequence
  Description of artificial sequence: 115.4 Cas9 TadAins1007 polypeptide sequence
MDKKYSIGLAIGTNSVGWAVITDEYKVPSKKFKVLGNTDRHSIKKNLIGALLFDSGETAEATRLKRTARRRYTRRKNRICYLQEIFSNEMAKVDDSFFHRLEESFLVEEDKKHERHPIFGNIVDEVAYHEKYPTIYHLRKKLVDSTDKADLRLIYLALAHMIKFRGHFLIEGDLNPDNSDVDKLFIQLVQTYNQLFEENPINASGVDAKAILSARLSKSRRLENLIAQLPGEKKNGLFGNLIALSLGLTPNFKSNFDLAEDAKLQLSKDTYDDDLDNLLAQIGDQYADLFLAAKNLSDAILLSDILRVNTEITKAPLSASMIKRYDEHHQDLTLLKALVRQQLPEKYKEIFFDQSKNGYAGYIDGGASQEEFYKFIKPILEKMDGTEELLVKLNREDLLRKQRTFDNGSIPHQIHLGELHAILRRQEDFYPFLKDNREKIEKILTFRIPYYVGPLARGNSRFAWMTRKSEETITPWNFEEVVDKGASAQSFIERMTNFDKNLPNEKVLPKHSLLYEYFTVYNELTKVKYVTEGMRKPAFLSGEQKKAIVDLLFKTNRKVTVKQLKEDYFKKIECFDSVEISGVEDRFNASLGTYHDLLKIIKDKDFLDNEENEDILEDIVLTLTLFEDREMIEERLKTYAHLFDDKVMKQLKRRRYTGWGRLSRKLINGIRDKQSGKTILDFLKSDGFANRNFMQLIHDDSLTFKEDIQKAQVSGQGDSLHEHIANLAGSPAIKKGILQTVKVVDELVKVMGRHKPENIVIEMARENQTTQKGQKNSRERMKRIEEGIKELGSQILKEHPVENTQLQNEKLYLYYLQNGRDMYVDQELDINRLSDYDVDHIVPQSFLKDDSIDNKVLTRSDKNRGKSDNVPSEEVVKKMKNYWRQLLNAKLITQRKFDNLTKAERGGLSELDKAGFIKRQLVETRQITKHVAQILDSRMNTKYDENDKLIREVKVITLKSKLVSDFRKDFQFYKVREINNYHHAHDAYLNAVVGTALIKKYPKLESGSSGSETPGTSESATPESSGSEVEFSHEYWMRHALTLAKRARDEREVPVGAVLVLNNRVIGEGWNRAIGLHDPTAHAEIMALRQGGLVMQNYRLIDATLYVTFEPCVMCAGAMIHSRIGRVVFGVRNAKTGAAGSLMDVLHYPGMNHRVEITEGILADECAALLCYFFRMPRQEFVYGDYKVYDVRKMIAKSEQEIGKATAKYFFYSNIMNFFKTEITLANGEIRKRPLIETNGETGEIVWDKGRDFATVRKVLSMPQVNIVKKTEVQTGGFSKESILPKRNSDKLIARKKDWDPKKYGGFDSPTVAYSVLVVAKVEKGKSKKLKSVKELLGITIMERSSFEKNPIDFLEAKGYKEVKKDLIIKLPKYSLFELENGRKRMLASAGELQKGNELALPSKYVNFLYLASHYEKLKGSPEDNEQKQLFVEQHKHYLDEIIEQISEFSKRVILADANLDKVLSAYNKHRDKPIREQAENIIHLFTLTNLGAPAAFKYFDTTIDRKRYTSTKEVLDATLIHQSITGLYETRIDLSQLGGD

SEQ ID NO: 215 - protein, 1541 aa, Artificial Sequence
  Description of artificial sequence: 116.1 Cas9 TadAins C-term truncate2 792 polypeptide sequence
MDKKYSIGLAIGTNSVGWAVITDEYKVPSKKFKVLGNTDRHSIKKNLIGALLFDSGETAEATRLKRTARRRYTRRKNRICYLQEIFSNEMAKVDDSFFHRLEESFLVEEDKKHERHPIFGNIVDEVAYHEKYPTIYHLRKKLVDSTDKADLRLIYLALAHMIKFRGHFLIEGDLNPDNSDVDKLFIQLVQTYNQLFEENPINASGVDAKAILSARLSKSRRLENLIAQLPGEKKNGLFGNLIALSLGLTPNFKSNFDLAEDAKLQLSKDTYDDDLDNLLAQIGDQYADLFLAAKNLSDAILLSDILRVNTEITKAPLSASMIKRYDEHHQDLTLLKALVRQQLPEKYKEIFFDQSKNGYAGYIDGGASQEEFYKFIKPILEKMDGTEELLVKLNREDLLRKQRTFDNGSIPHQIHLGELHAILRRQEDFYPFLKDNREKIEKILTFRIPYYVGPLARGNSRFAWMTRKSEETITPWNFEEVVDKGASAQSFIERMTNFDKNLPNEKVLPKHSLLYEYFTVYNELTKVKYVTEGMRKPAFLSGEQKKAIVDLLFKTNRKVTVKQLKEDYFKKIECFDSVEISGVEDRFNASLGTYHDLLKIIKDKDFLDNEENEDILEDIVLTLTLFEDREMIEERLKTYAHLFDDKVMKQLKRRRYTGWGRLSRKLINGIRDKQSGKTILDFLKSDGFANRNFMQLIHDDSLTFKEDIQKAQVSGQGDSLHEHIANLAGSPAIKKGILQTVKVVDELVKVMGRHKPENIVIEMARENQTTQKGQKNSRERMKRIEEGIKELGGSSGSETPGTSESATPESSGSEVEFSHEYWMRHALTLAKRARDEREVPVGAVLVLNNRVIGEGWNRAIGLHDPTAHAEIMALRQGGLVMQNYRLIDATLYVTFEPCVMCAGAMIHSRIGRVVFGVRNAKTGAAGSLMDVLHYPGMNHRVEITEGILADECAALLCYFFRMPRQSQILKEHPVENTQLQNEKLYLYYLQNGRDMYVDQELDINRLSDYDVDHIVPQSFLKDDSIDNKVLTRSDKNRGKSDNVPSEEVVKKMKNYWRQLLNAKLITQRKFDNLTKAERGGLSELDKAGFIKRQLVETRQITKHVAQILDSRMNTKYDENDKLIREVKVITLKSKLVSDFRKDFQFYKVREINNYHHAHDAYLNAVVGTALIKKYPKLESEFVYGDYKVYDVRKMIAKSEQEIGKATAKYFFYSNIMNFFKTEITLANGEIRKRPLIETNGETGEIVWDKGRDFATVRKVLSMPQVNIVKKTEVQTGGFSKESILPKRNSDKLIARKKDWDPKKYGGFDSPTVAYSVLVVAKVEKGKSKKLKSVKELLGITIMERSSFEKNPIDFLEAKGYKEVKKDLIIKLPKYSLFELENGRKRMLASAGELQKGNELALPSKYVNFLYLASHYEKLKGSPEDNEQKQLFVEQHKHYLDEIIEQISEFSKRVILADANLDKVLSAYNKHRDKPIREQAENIIHLFTLTNLGAPAAFKYFDTTIDRKRYTSTKEVLDATLIHQSITGLYETRIDLSQLGGD

SEQ ID NO: 216 - protein, 1541 aa, Artificial Sequence
  Description of artificial sequence: 116.2 Cas9 TadAins C-term truncate2 791 polypeptide sequence
MDKKYSIGLAIGTNSVGWAVITDEYKVPSKKFKVLGNTDRHSIKKNLIGALLFDSGETAEATRLKRTARRRYTRRKNRICYLQEIFSNEMAKVDDSFFHRLEESFLVEEDKKHERHPIFGNIVDEVAYHEKYPTIYHLRKKLVDSTDKADLRLIYLALAHMIKFRGHFLIEGDLNPDNSDVDKLFIQLVQTYNQLFEENPINASGVDAKAILSARLSKSRRLENLIAQLPGEKKNGLFGNLIALSLGLTPNFKSNFDLAEDAKLQLSKDTYDDDLDNLLAQIGDQYADLFLAAKNLSDAILLSDILRVNTEITKAPLSASMIKRYDEHHQDLTLLKALVRQQLPEKYKEIFFDQSKNGYAGYIDGGASQEEFYKFIKPILEKMDGTEELLVKLNREDLLRKQRTFDNGSIPHQIHLGELHAILRRQEDFYPFLKDNREKIEKILTFRIPYYVGPLARGNSRFAWMTRKSEETITPWNFEEVVDKGASAQSFIERMTNFDKNLPNEKVLPKHSLLYEYFTVYNELTKVKYVTEGMRKPAFLSGEQKKAIVDLLFKTNRKVTVKQLKEDYFKKIECFDSVEISGVEDRFNASLGTYHDLLKIIKDKDFLDNEENEDILEDIVLTLTLFEDREMIEERLKTYAHLFDDKVMKQLKRRRYTGWGRLSRKLINGIRDKQSGKTILDFLKSDGFANRNFMQLIHDDSLTFKEDIQKAQVSGQGDSLHEHIANLAGSPAIKKGILQTVKVVDELVKVMGRHKPENIVIEMARENQTTQKGQKNSRERMKRIEEGIKELGSSGSETPGTSESATPESSGSEVEFSHEYWMRHALTLAKRARDEREVPVGAVLVLNNRVIGEGWNRAIGLHDPTAHAEIMALRQGGLVMQNYRLIDATLYVTFEPCVMCAGAMIHSRIGRVVFGVRNAKTGAAGSLMDVLHYPGMNHRVEITEGILADECAALLCYFFRMPRQGSQILKEHPVENTQLQNEKLYLYYLQNGRDMYVDQELDINRLSDYDVDHIVPQSFLKDDSIDNKVLTRSDKNRGKSDNVPSEEVVKKMKNYWRQLLNAKLITQRKFDNLTKAERGGLSELDKAGFIKRQLVETRQITKHVAQILDSRMNTKYDENDKLIREVKVITLKSKLVSDFRKDFQFYKVREINNYHHAHDAYLNAVVGTALIKKYPKLESEFVYGDYKVYDVRKMIAKSEQEIGKATAKYFFYSNIMNFFKTEITLANGEIRKRPLIETNGETGEIVWDKGRDFATVRKVLSMPQVNIVKKTEVQTGGFSKESILPKRNSDKLIARKKDWDPKKYGGFDSPTVAYSVLVVAKVEKGKSKKLKSVKELLGITIMERSSFEKNPIDFLEAKGYKEVKKDLIIKLPKYSLFELENGRKRMLASAGELQKGNELALPSKYVNFLYLASHYEKLKGSPEDNEQKQLFVEQHKHYLDEIIEQISEFSKRVILADANLDKVLSAYNKHRDKPIREQAENIIHLFTLTNLGAPAAFKYFDTTIDRKRYTSTKEVLDATLIHQSITGLYETRIDLSQLGGD

SEQ ID NO: 217 - protein, 1541 aa, Artificial Sequence
  Description of artificial sequence: 116.3 Cas9 TadAins C-term truncate2 790 polypeptide sequence
MDKKYSIGLAIGTNSVGWAVITDEYKVPSKKFKVLGNTDRHSIKKNLIGALLFDSGETAEATRLKRTARRRYTRRKNRICYLQEIFSNEMAKVDDSFFHRLEESFLVEEDKKHERHPIFGNIVDEVAYHEKYPTIYHLRKKLVDSTDKADLRLIYLALAHMIKFRGHFLIEGDLNPDNSDVDKLFIQLVQTYNQLFEENPINASGVDAKAILSARLSKSRRLENLIAQLPGEKKNGLFGNLIALSLGLTPNFKSNFDLAEDAKLQLSKDTYDDDLDNLLAQIGDQYADLFLAAKNLSDAILLSDILRVNTEITKAPLSASMIKRYDEHHQDLTLLKALVRQQLPEKYKEIFFDQSKNGYAGYIDGGASQEEFYKFIKPILEKMDGTEELLVKLNREDLLRKQRTFDNGSIPHQIHLGELHAILRRQEDFYPFLKDNREKIEKILTFRIPYYVGPLARGNSRFAWMTRKSEETITPWNFEEVVDKGASAQSFIERMTNFDKNLPNEKVLPKHSLLYEYFTVYNELTKVKYVTEGMRKPAFLSGEQKKAIVDLLFKTNRKVTVKQLKEDYFKKIECFDSVEISGVEDRFNASLGTYHDLLKIIKDKDFLDNEENEDILEDIVLTLTLFEDREMIEERLKTYAHLFDDKVMKQLKRRRYTGWGRLSRKLINGIRDKQSGKTILDFLKSDGFANRNFMQLIHDDSLTFKEDIQKAQVSGQGDSLHEHIANLAGSPAIKKGILQTVKVVDELVKVMGRHKPENIVIEMARENQTTQKGQKNSRERMKRIEEGIKEGSSGSETPGTSESATPESSGSEVEFSHEYWMRHALTLAKRARDEREVPVGAVLVLNNRVIGEGWNRAIGLHDPTAHAEIMALRQGGLVMQNYRLIDATLYVTFEPCVMCAGAMIHSRIGRVVFGVRNAKTGAAGSLMDVLHYPGMNHRVEITEGILADECAALLCYFFRMPRQLGSQILKEHPVENTQLQNEKLYLYYLQNGRDMYVDQELDINRLSDYDVDHIVPQSFLKDDSIDNKVLTRSDKNRGKSDNVPSEEVVKKMKNYWRQLLNAKLITQRKFDNLTKAERGGLSELDKAGFIKRQLVETRQITKHVAQILDSRMNTKYDENDKLIREVKVITLKSKLVSDFRKDFQFYKVREINNYHHAHDAYLNAVVGTALIKKYPKLESEFVYGDYKVYDVRKMIAKSEQEIGKATAKYFFYSNIMNFFKTEITLANGEIRKRPLIETNGETGEIVWDKGRDFATVRKVLSMPQVNIVKKTEVQTGGFSKESILPKRNSDKLIARKKDWDPKKYGGFDSPTVAYSVLVVAKVEKGKSKKLKSVKELLGITIMERSSFEKNPIDFLEAKGYKEVKKDLIIKLPKYSLFELENGRKRMLASAGELQKGNELALPSKYVNFLYLASHYEKLKGSPEDNEQKQLFVEQHKHYLDEIIEQISEFSKRVILADANLDKVLSAYNKHRDKPIREQAENIIHLFTLTNLGAPAAFKYFDTTIDRKRYTSTKEVLDATLIHQSITGLYETRIDLSQLGGD

SEQ ID NO: 218 - protein, 1484 aa, Artificial Sequence
  Description of artificial sequence: 117 Cas9 delta 1017-1069 polypeptide sequence
MDKKYSIGLAIGTNSVGWAVITDEYKVPSKKFKVLGNTDRHSIKKNLIGALLFDSGETAEATRLKRTARRRYTRRKNRICYLQEIFSNEMAKVDDSFFHRLEESFLVEEDKKHERHPIFGNIVDEVAYHEKYPTIYHLRKKLVDSTDKADLRLIYLALAHMIKFRGHFLIEGDLNPDNSDVDKLFIQLVQTYNQLFEENPINASGVDAKAILSARLSKSRRLENLIAQLPGEKKNGLFGNLIALSLGLTPNFKSNFDLAEDAKLQLSKDTYDDDLDNLLAQIGDQYADLFLAAKNLSDAILLSDILRVNTEITKAPLSASMIKRYDEHHQDLTLLKALVRQQLPEKYKEIFFDQSKNGYAGYIDGGASQEEFYKFIKPILEKMDGTEELLVKLNREDLLRKQRTFDNGSIPHQIHLGELHAILRRQEDFYPFLKDNREKIEKILTFRIPYYVGPLARGNSRFAWMTRKSEETITPWNFEEVVDKGASAQSFIERMTNFDKNLPNEKVLPKHSLLYEYFTVYNELTKVKYVTEGMRKPAFLSGEQKKAIVDLLFKTNRKVTVKQLKEDYFKKIECFDSVEISGVEDRFNASLGTYHDLLKIIKDKDFLDNEENEDILEDIVLTLTLFEDREMIEERLKTYAHLFDDKVMKQLKRRRYTGWGRLSRKLINGIRDKQSGKTILDFLKSDGFANRNFMQLIHDDSLTFKEDIQKAQVSGQGDSLHEHIANLAGSPAIKKGILQTVKVVDELVKVMGRHKPENIVIEMARENQTTQKGQKNSRERMKRIEEGIKELGSQILKEHPVENTQLQNEKLYLYYLQNGRDMYVDQELDINRLSDYDVDHIVPQSFLKDDSIDNKVLTRSDKNRGKSDNVPSEEVVKKMKNYWRQLLNAKLITQRKFDNLTKAERGGLSELDKAGFIKRQLVETRQITKHVAQILDSRMNTKYDENDKLIREVKVITLKSKLVSDFRKDFQFYKVREINNYHHAHDAYLNAVVGTALIKKYPKLESEFVYGDYKVYSSGSEVEFSHEYWMRHALTLAKRARDEREVPVGAVLVLNNRVIGEGWNRAIGLHDPTAHAEIMALRQGGLVMQNYRLIDATLYVTFEPCVMCAGAMIHSRIGRVVFGVRNAKTGAAGSLMDVLHYPGMNHRVEITEGILADECAALLCYFFRMPRQVFNAQKKAQSSTDGEIVWDKGRDFATVRKVLSMPQVNIVKKTEVQTGGFSKESILPKRNSDKLIARKKDWDPKKYGGFDSPTVAYSVLVVAKVEKGKSKKLKSVKELLGITIMERSSFEKNPIDFLEAKGYKEVKKDLIIKLPKYSLFELENGRKRMLASAGELQKGNELALPSKYVNFLYLASHYEKLKGSPEDNEQKQLFVEQHKHYLDEIIEQISEFSKRVILADANLDKVLSAYNKHRDKPIREQAENIIHLFTLTNLGAPAAFKYFDTTIDRKRYTSTKEVLDATLIHQSITGLYETRIDLSQLGGD

SEQ ID NO: 219 - protein, 1554 aa, Artificial Sequence
  Description of artificial sequence: 118 Cas9 TadA-CP116ins 1067 polypeptide sequence
MDKKYSIGLAIGTNSVGWAVITDEYKVPSKKFKVLGNTDRHSIKKNLIGALLFDSGETAEATRLKRTARRRYTRRKNRICYLQEIFSNEMAKVDDSFFHRLEESFLVEEDKKHERHPIFGNIVDEVAYHEKYPTIYHLRKKLVDSTDKADLRLIYLALAHMIKFRGHFLIEGDLNPDNSDVDKLFIQLVQTYNQLFEENPINASGVDAKAILSARLSKSRRLENLIAQLPGEKKNGLFGNLIALSLGLTPNFKSNFDLAEDAKLQLSKDTYDDDLDNLLAQIGDQYADLFLAAKNLSDAILLSDILRVNTEITKAPLSASMIKRYDEHHQDLTLLKALVRQQLPEKYKEIFFDQSKNGYAGYIDGGASQEEFYKFIKPILEKMDGTEELLVKLNREDLLRKQRTFDNGSIPHQIHLGELHAILRRQEDFYPFLKDNREKIEKILTFRIPYYVGPLARGNSRFAWMTRKSEETITPWNFEEVVDKGASAQSFIERMTNFDKNLPNEKVLPKHSLLYEYFTVYNELTKVKYVTEGMRKPAFLSGEQKKAIVDLLFKTNRKVTVKQLKEDYFKKIECFDSVEISGVEDRFNASLGTYHDLLKIIKDKDFLDNEENEDILEDIVLTLTLFEDREMIEERLKTYAHLFDDKVMKQLKRRRYTGWGRLSRKLINGIRDKQSGKTILDFLKSDGFANRNFMQLIHDDSLTFKEDIQKAQVSGQGDSLHEHIANLAGSPAIKKGILQTVKVVDELVKVMGRHKPENIVIEMARENQTTQKGQKNSRERMKRIEEGIKELGSQILKEHPVENTQLQNEKLYLYYLQNGRDMYVDQELDINRLSDYDVDHIVPQSFLKDDSIDNKVLTRSDKNRGKSDNVPSEEVVKKMKNYWRQLLNAKLITQRKFDNLTKAERGGLSELDKAGFIKRQLVETRQITKHVAQILDSRMNTKYDENDKLIREVKVITLKSKLVSDFRKDFQFYKVREINNYHHAHDAYLNAVVGTALIKKYPKLESEFVYGDYKVYDVRKMIAKSEQEIGKATAKYFFYSNIMNFFKTEITLANGEIRKRPLIETNMNHRVEITEGILADECAALLCYFFRMPRQVFNAQKKAQSSTDGSSGSETPGTSESATPESSGSEVEFSHEYWMRHALTLAKRARDEREVPVGAVLVLNNRVIGEGWNRAIGLHDPTAHAEIMALRQGGLVMQNYRLIDATLYVTFEPCVMCAGAMIHSRIGRVVFGVRNAKTGAAGSLMDVLHYPGGETGEIVWDKGRDFATVRKVLSMPQVNIVKKTEVQTGGFSKESILPKRNSDKLIARKKDWDPKKYGGFDSPTVAYSVLVVAKVEKGKSKKLKSVKELLGITIMERSSFEKNPIDFLEAKGYKEVKKDLIIKLPKYSLFELENGRKRMLASAGELQKGNELALPSKYVNFLYLASHYEKLKGSPEDNEQKQLFVEQHKHYLDEIIEQISEFSKRVILADANLDKVLSAYNKHRDKPIREQAENIIHLFTLTNLGAPAAFKYFDTTIDRKRYTSTKEVLDATLIHQSITGLYETRIDLSQLGGD

SEQ ID NO: 220 - protein, 1554 aa, Artificial Sequence
  Description of artificial sequence: 119 Cas9 TadAins 701 polypeptide sequence
MDKKYSIGLAIGTNSVGWAVITDEYKVPSKKFKVLGNTDRHSIKKNLIGALLFDSGETAEATRLKRTARRRYTRRKNRICYLQEIFSNEMAKVDDSFFHRLEESFLVEEDKKHERHPIFGNIVDEVAYHEKYPTIYHLRKKLVDSTDKADLRLIYLALAHMIKFRGHFLIEGDLNPDNSDVDKLFIQLVQTYNQLFEENPINASGVDAKAILSARLSKSRRLENLIAQLPGEKKNGLFGNLIALSLGLTPNFKSNFDLAEDAKLQLSKDTYDDDLDNLLAQIGDQYADLFLAAKNLSDAILLSDILRVNTEITKAPLSASMIKRYDEHHQDLTLLKALVRQQLPEKYKEIFFDQSKNGYAGYIDGGASQEEFYKFIKPILEKMDGTEELLVKLNREDLLRKQRTFDNGSIPHQIHLGELHAILRRQEDFYPFLKDNREKIEKILTFRIPYYVGPLARGNSRFAWMTRKSEETITPWNFEEVVDKGASAQSFIERMTNFDKNLPNEKVLPKHSLLYEYFTVYNELTKVKYVTEGMRKPAFLSGEQKKAIVDLLFKTNRKVTVKQLKEDYFKKIECFDSVEISGVEDRFNASLGTYHDLLKIIKDKDFLDNEENEDILEDIVLTLTLFEDREMIEERLKTYAHLFDDKVMKQLKRRRYTGWGRLSRKLINGIRDKQSGKTILDFLKSDGFANRNFMQLIHDDSGSSGSETPGTSESATPESSGSEVEFSHEYWMRHALTLAKRARDEREVPVGAVLVLNNRVIGEGWNRAIGLHDPTAHAEIMALRQGGLVMQNYRLIDATLYVTFEPCVMCAGAMIHSRIGRVVFGVRNAKTGAAGSLMDVLHYPGMNHRVEITEGILADECAALLCYFFRMPRQVFNAQKKAQSSTDLTFKEDIQKAQVSGQGDSLHEHIANLAGSPAIKKGILQTVKVVDELVKVMGRHKPENIVIEMARENQTTQKGQKNSRERMKRIEEGIKELGSQILKEHPVENTQLQNEKLYLYYLQNGRDMYVDQELDINRLSDYDVDHIVPQSFLKDDSIDNKVLTRSDKNRGKSDNVPSEEVVKKMKNYWRQLLNAKLITQRKFDNLTKAERGGLSELDKAGFIKRQLVETRQITKHVAQILDSRMNTKYDENDKLIREVKVITLKSKLVSDFRKDFQFYKVREINNYHHAHDAYLNAVVGTALIKKYPKLESEFVYGDYKVYDVRKMIAKSEQEIGKATAKYFFYSNIMNFFKTEITLANGEIRKRPLIETNGETGEIVWDKGRDFATVRKVLSMPQVNIVKKTEVQTGGFSKESILPKRNSDKLIARKKDWDPKKYGGFDSPTVAYSVLVVAKVEKGKSKKLKSVKELLGITIMERSSFEKNPIDFLEAKGYKEVKKDLIIKLPKYSLFELENGRKRMLASAGELQKGNELALPSKYVNFLYLASHYEKLKGSPEDNEQKQLFVEQHKHYLDEIIEQISEFSKRVILADANLDKVLSAYNKHRDKPIREQAENIIHLFTLTNLGAPAAFKYFDTTIDRKRYTSTKEVLDATLIHQSITGLYETRIDLSQLGGD

SEQ ID NO: 221 - protein, 1554 aa, Artificial Sequence
  Description of artificial sequence: 120 Cas9 TadACP136ins 1248 polypeptide sequence
MDKKYSIGLAIGTNSVGWAVITDEYKVPSKKFKVLGNTDRHSIKKNLIGALLFDSGETAEATRLKRTARRRYTRRKNRICYLQEIFSNEMAKVDDSFFHRLEESFLVEEDKKHERHPIFGNIVDEVAYHEKYPTIYHLRKKLVDSTDKADLRLIYLALAHMIKFRGHFLIEGDLNPDNSDVDKLFIQLVQTYNQLFEENPINASGVDAKAILSARLSKSRRLENLIAQLPGEKKNGLFGNLIALSLGLTPNFKSNFDLAEDAKLQLSKDTYDDDLDNLLAQIGDQYADLFLAAKNLSDAILLSDILRVNTEITKAPLSASMIKRYDEHHQDLTLLKALVRQQLPEKYKEIFFDQSKNGYAGYIDGGASQEEFYKFIKPILEKMDGTEELLVKLNREDLLRKQRTFDNGSIPHQIHLGELHAILRRQEDFYPFLKDNREKIEKILTFRIPYYVGPLARGNSRFAWMTRKSEETITPWNFEEVVDKGASAQSFIERMTNFDKNLPNEKVLPKHSLLYEYFTVYNELTKVKYVTEGMRKPAFLSGEQKKAIVDLLFKTNRKVTVKQLKEDYFKKIECFDSVEISGVEDRFNASLGTYHDLLKIIKDKDFLDNEENEDILEDIVLTLTLFEDREMIEERLKTYAHLFDDKVMKQLKRRRYTGWGRLSRKLINGIRDKQSGKTILDFLKSDGFANRNFMQLIHDDSLTFKEDIQKAQVSGQGDSLHEHIANLAGSPAIKKGILQTVKVVDELVKVMGRHKPENIVIEMARENQTTQKGQKNSRERMKRIEEGIKELGSQILKEHPVENTQLQNEKLYLYYLQNGRDMYVDQELDINRLSDYDVDHIVPQSFLKDDSIDNKVLTRSDKNRGKSDNVPSEEVVKKMKNYWRQLLNAKLITQRKFDNLTKAERGGLSELDKAGFIKRQLVETRQITKHVAQILDSRMNTKYDENDKLIREVKVITLKSKLVSDFRKDFQFYKVREINNYHHAHDAYLNAVVGTALIKKYPKLESEFVYGDYKVYDVRKMIAKSEQEIGKATAKYFFYSNIMNFFKTEITLANGEIRKRPLIETNGETGEIVWDKGRDFATVRKVLSMPQVNIVKKTEVQTGGFSKESILPKRNSDKLIARKKDWDPKKYGGFDSPTVAYSVLVVAKVEKGKSKKLKSVKELLGITIMERSSFEKNPIDFLEAKGYKEVKKDLIIKLPKYSLFELENGRKRMLASAGELQKGNELALPSKYVNFLYLASHYEKLKGSMNHRVEITEGILADECAALLCYFFRMPRQVFNAQKKAQSSTDGSSGSETPGTSESATPESSGSEVEFSHEYWMRHALTLAKRARDEREVPVGAVLVLNNRVIGEGWNRAIGLHDPTAHAEIMALRQGGLVMQNYRLIDATLYVTFEPCVMCAGAMIHSRIGRVVFGVRNAKTGAAGSLMDVLHYPGPEDNEQKQLFVEQHKHYLDEIIEQISEFSKRVILADANLDKVLSAYNKHRDKPIREQAENIIHLFTLTNLGAPAAFKYFDTTIDRKRYTSTKEVLDATLIHQSITGLYETRIDLSQLGGD

SEQ ID NO: 222 - protein, 1554 aa, Artificial Sequence
  Description of artificial sequence: 121 Cas9 TadACP136ins 1052 polypeptide sequence
MDKKYSIGLAIGTNSVGWAVITDEYKVPSKKFKVLGNTDRHSIKKNLIGALLFDSGETAEATRLKRTARRRYTRRKNRICYLQEIFSNEMAKVDDSFFHRLEESFLVEEDKKHERHPIFGNIVDEVAYHEKYPTIYHLRKKLVDSTDKADLRLIYLALAHMIKFRGHFLIEGDLNPDNSDVDKLFIQLVQTYNQLFEENPINASGVDAKAILSARLSKSRRLENLIAQLPGEKKNGLFGNLIALSLGLTPNFKSNFDLAEDAKLQLSKDTYDDDLDNLLAQIGDQYADLFLAAKNLSDAILLSDILRVNTEITKAPLSASMIKRYDEHHQDLTLLKALVRQQLPEKYKEIFFDQSKNGYAGYIDGGASQEEFYKFIKPILEKMDGTEELLVKLNREDLLRKQRTFDNGSIPHQIHLGELHAILRRQEDFYPFLKDNREKIEKILTFRIPYYVGPLARGNSRFAWMTRKSEETITPWNFEEVVDKGASAQSFIERMTNFDKNLPNEKVLPKHSLLYEYFTVYNELTKVKYVTEGMRKPAFLSGEQKKAIVDLLFKTNRKVTVKQLKEDYFKKIECFDSVEISGVEDRFNASLGTYHDLLKIIKDKDFLDNEENEDILEDIVLTLTLFEDREMIEERLKTYAHLFDDKVMKQLKRRRYTGWGRLSRKLINGIRDKQSGKTILDFLKSDGFANRNFMQLIHDDSLTFKEDIQKAQVSGQGDSLHEHIANLAGSPAIKKGILQTVKVVDELVKVMGRHKPENIVIEMARENQTTQKGQKNSRERMKRIEEGIKELGSQILKEHPVENTQLQNEKLYLYYLQNGRDMYVDQELDINRLSDYDVDHIVPQSFLKDDSIDNKVLTRSDKNRGKSDNVPSEEVVKKMKNYWRQLLNAKLITQRKFDNLTKAERGGLSELDKAGFIKRQLVETRQITKHVAQILDSRMNTKYDENDKLIREVKVITLKSKLVSDFRKDFQFYKVREINNYHHAHDAYLNAVVGTALIKKYPKLESEFVYGDYKVYDVRKMIAKSEQEIGKATAKYFFYSNIMNFFKTEITLAMNHRVEITEGILADECAALLCYFFRMPRQVFNAQKKAQSSTDGSSGSETPGTSESATPESSGSEVEFSHEYWMRHALTLAKRARDEREVPVGAVLVLNNRVIGEGWNRAIGLHDPTAHAEIMALRQGGLVMQNYRLIDATLYVTFEPCVMCAGAMIHSRIGRVVFGVRNAKTGAAGSLMDVLHYPGNGEIRKRPLIETNGETGEIVWDKGRDFATVRKVLSMPQVNIVKKTEVQTGGFSKESILPKRNSDKLIARKKDWDPKKYGGFDSPTVAYSVLVVAKVEKGKSKKLKSVKELLGITIMERSSFEKNPIDFLEAKGYKEVKKDLIIKLPKYSLFELENGRKRMLASAGELQKGNELALPSKYVNFLYLASHYEKLKGSPEDNEQKQLFVEQHKHYLDEIIEQISEFSKRVILADANLDKVLSAYNKHRDKPIREQAENIIHLFTLTNLGAPAAFKYFDTTIDRKRYTSTKEVLDATLIHQSITGLYETRIDLSQLGGD

SEQ ID NO: 223 - protein, 1554 aa, Artificial Sequence
  Description of artificial sequence: 122 Cas9 TadACP136ins 1041 polypeptide sequence
MDKKYSIGLAIGTNSVGWAVITDEYKVPSKKFKVLGNTDRHSIKKNLIGALLFDSGETAEATRLKRTARRRYTRRKNRICYLQEIFSNEMAKVDDSFFHRLEESFLVEEDKKHERHPIFGNIVDEVAYHEKYPTIYHLRKKLVDSTDKADLRLIYLALAHMIKFRGHFLIEGDLNPDNSDVDKLFIQLVQTYNQLFEENPINASGVDAKAILSARLSKSRRLENLIAQLPGEKKNGLFGNLIALSLGLTPNFKSNFDLAEDAKLQLSKDTYDDDLDNLLAQIGDQYADLFLAAKNLSDAILLSDILRVNTEITKAPLSASMIKRYDEHHQDLTLLKALVRQQLPEKYKEIFFDQSKNGYAGYIDGGASQEEFYKFIKPILEKMDGTEELLVKLNREDLLRKQRTFDNGSIPHQIHLGELHAILRRQEDFYPFLKDNREKIEKILTFRIPYYVGPLARGNSRFAWMTRKSEETITPWNFEEVVDKGASAQSFIERMTNFDKNLPNEKVLPKHSLLYEYFTVYNELTKVKYVTEGMRKPAFLSGEQKKAIVDLLFKTNRKVTVKQLKEDYFKKIECFDSVEISGVEDRFNASLGTYHDLLKIIKDKDFLDNEENEDILEDIVLTLTLFEDREMIEERLKTYAHLFDDKVMKQLKRRRYTGWGRLSRKLINGIRDKQSGKTILDFLKSDGFANRNFMQLIHDDSLTFKEDIQKAQVSGQGDSLHEHIANLAGSPAIKKGILQTVKVVDELVKVMGRHKPENIVIEMARENQTTQKGQKNSRERMKRIEEGIKELGSQILKEHPVENTQLQNEKLYLYYLQNGRDMYVDQELDINRLSDYDVDHIVPQSFLKDDSIDNKVLTRSDKNRGKSDNVPSEEVVKKMKNYWRQLLNAKLITQRKFDNLTKAERGGLSELDKAGFIKRQLVETRQITKHVAQILDSRMNTKYDENDKLIREVKVITLKSKLVSDFRKDFQFYKVREINNYHHAHDAYLNAVVGTALIKKYPKLESEFVYGDYKVYDVRKMIAKSEQEIGKATAKYFFYSMNHRVEITEGILADECAALLCYFFRMPRQVFNAQKKAQSSTDGSSGSETPGTSESATPESSGSEVEFSHEYWMRHALTLAKRARDEREVPVGAVLVLNNRVIGEGWNRAIGLHDPTAHAEIMALRQGGLVMQNYRLIDATLYVTFEPCVMCAGAMIHSRIGRVVFGVRNAKTGAAGSLMDVLHYPGNIMNFFKTEITLANGEIRKRPLIETNGETGEIVWDKGRDFATVRKVLSMPQVNIVKKTEVQTGGFSKESILPKRNSDKLIARKKDWDPKKYGGFDSPTVAYSVLVVAKVEKGKSKKLKSVKELLGITIMERSSFEKNPIDFLEAKGYKEVKKDLIIKLPKYSLFELENGRKRMLASAGELQKGNELALPSKYVNFLYLASHYEKLKGSPEDNEQKQLFVEQHKHYLDEIIEQISEFSKRVILADANLDKVLSAYNKHRDKPIREQAENIIHLFTLTNLGAPAAFKYFDTTIDRKRYTSTKEVLDATLIHQSITGLYETRIDLSQLGGD

SEQ ID NO: 224 - protein, 1554 aa, Artificial Sequence
  Description of artificial sequence: 123 Cas9 TadACP139ins 1299 polypeptide sequence
MDKKYSIGLAIGTNSVGWAVITDEYKVPSKKFKVLGNTDRHSIKKNLIGALLFDSGETAEATRLKRTARRRYTRRKNRICYLQEIFSNEMAKVDDSFFHRLEESFLVEEDKKHERHPIFGNIVDEVAYHEKYPTIYHLRKKLVDSTDKADLRLIYLALAHMIKFRGHFLIEGDLNPDNSDVDKLFIQLVQTYNQLFEENPINASGVDAKAILSARLSKSRRLENLIAQLPGEKKNGLFGNLIALSLGLTPNFKSNFDLAEDAKLQLSKDTYDDDLDNLLAQIGDQYADLFLAAKNLSDAILLSDILRVNTEITKAPLSASMIKRYDEHHQDLTLLKALVRQQLPEKYKEIFFDQSKNGYAGYIDGGASQEEFYKFIKPILEKMDGTEELLVKLNREDLLRKQRTFDNGSIPHQIHLGELHAILRRQEDFYPFLKDNREKIEKILTFRIPYYVGPLARGNSRFAWMTRKSEETITPWNFEEVVDKGASAQSFIERMTNFDKNLPNEKVLPKHSLLYEYFTVYNELTKVKYVTEGMRKPAFLSGEQKKAIVDLLFKTNRKVTVKQLKEDYFKKIECFDSVEISGVEDRFNASLGTYHDLLKIIKDKDFLDNEENEDILEDIVLTLTLFEDREMIEERLKTYAHLFDDKVMKQLKRRRYTGWGRLSRKLINGIRDKQSGKTILDFLKSDGFANRNFMQLIHDDSLTFKEDIQKAQVSGQGDSLHEHIANLAGSPAIKKGILQTVKVVDELVKVMGRHKPENIVIEMARENQTTQKGQKNSRERMKRIEEGIKELGSQILKEHPVENTQLQNEKLYLYYLQNGRDMYVDQELDINRLSDYDVDHIVPQSFLKDDSIDNKVLTRSDKNRGKSDNVPSEEVVKKMKNYWRQLLNAKLITQRKFDNLTKAERGGLSELDKAGFIKRQLVETRQITKHVAQILDSRMNTKYDENDKLIREVKVITLKSKLVSDFRKDFQFYKVREINNYHHAHDAYLNAVVGTALIKKYPKLESEFVYGDYKVYDVRKMIAKSEQEIGKATAKYFFYSNIMNFFKTEITLANGEIRKRPLIETNGETGEIVWDKGRDFATVRKVLSMPQVNIVKKTEVQTGGFSKESILPKRNSDKLIARKKDWDPKKYGGFDSPTVAYSVLVVAKVEKGKSKKLKSVKELLGITIMERSSFEKNPIDFLEAKGYKEVKKDLIIKLPKYSLFELENGRKRMLASAGELQKGNELALPSKYVNFLYLASHYEKLKGSPEDNEQKQLFVEQHKHYLDEIIEQISEFSKRVILADANLDKVLSAYNKHRMNHRVEITEGILADECAALLCYFFRMPRQVFNAQKKAQSSTDGSSGSETPGTSESATPESSGSEVEFSHEYWMRHALTLAKRARDEREVPVGAVLVLNNRVIGEGWNRAIGLHDPTAHAEIMALRQGGLVMQNYRLIDATLYVTFEPCVMCAGAMIHSRIGRVVFGVRNAKTGAAGSLMDVLHYPGDKPIREQAENIIHLFTLTNLGAPAAFKYFDTTIDRKRYTSTKEVLDATLIHQSITGLYETRIDLSQLGGD

SEQ ID NO: 225 - protein, 1454 aa, Artificial Sequence
  Description of artificial sequence: 124 Cas9 delta 792-872 TadAins polypeptide sequence
MDKKYSIGLAIGTNSVGWAVITDEYKVPSKKFKVLGNTDRHSIKKNLIGALLFDSGETAEATRLKRTARRRYTRRKNRICYLQEIFSNEMAKVDDSFFHRLEESFLVEEDKKHERHPIFGNIVDEVAYHEKYPTIYHLRKKLVDSTDKADLRLIYLALAHMIKFRGHFLIEGDLNPDNSDVDKLFIQLVQTYNQLFEENPINASGVDAKAILSARLSKSRRLENLIAQLPGEKKNGLFGNLIALSLGLTPNFKSNFDLAEDAKLQLSKDTYDDDLDNLLAQIGDQYADLFLAAKNLSDAILLSDILRVNTEITKAPLSASMIKRYDEHHQDLTLLKALVRQQLPEKYKEIFFDQSKNGYAGYIDGGASQEEFYKFIKPILEKMDGTEELLVKLNREDLLRKQRTFDNGSIPHQIHLGELHAILRRQEDFYPFLKDNREKIEKILTFRIPYYVGPLARGNSRFAWMTRKSEETITPWNFEEVVDKGASAQSFIERMTNFDKNLPNEKVLPKHSLLYEYFTVYNELTKVKYVTEGMRKPAFLSGEQKKAIVDLLFKTNRKVTVKQLKEDYFKKIECFDSVEISGVEDRFNASLGTYHDLLKIIKDKDFLDNEENEDILEDIVLTLTLFEDREMIEERLKTYAHLFDDKVMKQLKRRRYTGWGRLSRKLINGIRDKQSGKTILDFLKSDGFANRNFMQLIHDDSLTFKEDIQKAQVSGQGDSLHEHIANLAGSPAIKKGILQTVKVVDELVKVMGRHKPENIVIEMARENQTTQKGQKNSRERMKRIEEGIKELGSEVEFSHEYWMRHALTLAKRARDEREVPVGAVLVLNNRVIGEGWNRAIGLHDPTAHAEIMALRQGGLVMQNYRLIDATLYVTFEPCVMCAGAMIHSRIGRVVFGVRNAKTGAAGSLMDVLHYPGMNHRVEITEGILADECAALLCYFFRMPRQVFNAQKKAQSSTDEEVVKKMKNYWRQLLNAKLITQRKFDNLTKAERGGLSELDKAGFIKRQLVETRQITKHVAQILDSRMNTKYDENDKLIREVKVITLKSKLVSDFRKDFQFYKVREINNYHHAHDAYLNAVVGTALIKKYPKLESEFVYGDYKVYDVRKMIAKSEQEIGKATAKYFFYSNIMNFFKTEITLANGEIRKRPLIETNGETGEIVWDKGRDFATVRKVLSMPQVNIVKKTEVQTGGFSKESILPKRNSDKLIARKKDWDPKKYGGFDSPTVAYSVLVVAKVEKGKSKKLKSVKELLGITIMERSSFEKNPIDFLEAKGYKEVKKDLIIKLPKYSLFELENGRKRMLASAGELQKGNELALPSKYVNFLYLASHYEKLKGSPEDNEQKQLFVEQHKHYLDEIIEQISEFSKRVILADANLDKVLSAYNKHRDKPIREQAENIIHLFTLTNLGAPAAFKYFDTTIDRKRYTSTKEVLDATLIHQSITGLYETRIDLSQLGGD

SEQ ID NO: 226 - protein, 1420 aa, Artificial Sequence
  Description of artificial sequence: 125 Cas9 delta 792-906 TadAins polypeptide sequence
MDKKYSIGLAIGTNSVGWAVITDEYKVPSKKFKVLGNTDRHSIKKNLIGALLFDSGETAEATRLKRTARRRYTRRKNRICYLQEIFSNEMAKVDDSFFHRLEESFLVEEDKKHERHPIFGNIVDEVAYHEKYPTIYHLRKKLVDSTDKADLRLIYLALAHMIKFRGHFLIEGDLNPDNSDVDKLFIQLVQTYNQLFEENPINASGVDAKAILSARLSKSRRLENLIAQLPGEKKNGLFGNLIALSLGLTPNFKSNFDLAEDAKLQLSKDTYDDDLDNLLAQIGDQYADLFLAAKNLSDAILLSDILRVNTEITKAPLSASMIKRYDEHHQDLTLLKALVRQQLPEKYKEIFFDQSKNGYAGYIDGGASQEEFYKFIKPILEKMDGTEELLVKLNREDLLRKQRTFDNGSIPHQIHLGELHAILRRQEDFYPFLKDNREKIEKILTFRIPYYVGPLARGNSRFAWMTRKSEETITPWNFEEVVDKGASAQSFIERMTNFDKNLPNEKVLPKHSLLYEYFTVYNELTKVKYVTEGMRKPAFLSGEQKKAIVDLLFKTNRKVTVKQLKEDYFKKIECFDSVEISGVEDRFNASLGTYHDLLKIIKDKDFLDNEENEDILEDIVLTLTLFEDREMIEERLKTYAHLFDDKVMKQLKRRRYTGWGRLSRKLINGIRDKQSGKTILDFLKSDGFANRNFMQLIHDDSLTFKEDIQKAQVSGQGDSLHEHIANLAGSPAIKKGILQTVKVVDELVKVMGRHKPENIVIEMARENQTTQKGQKNSRERMKRIEEGIKELGSEVEFSHEYWMRHALTLAKRARDEREVPVGAVLVLNNRVIGEGWNRAIGLHDPTAHAEIMALRQGGLVMQNYRLIDATLYVTFEPCVMCAGAMIHSRIGRVVFGVRNAKTGAAGSLMDVLHYPGMNHRVEITEGILADECAALLCYFFRMPRQVFNAQKKAQSSTDGLSELDKAGFIKRQLVETRQITKHVAQILDSRMNTKYDENDKLIREVKVITLKSKLVSDFRKDFQFYKVREINNYHHAHDAYLNAVVGTALIKKYPKLESEFVYGDYKVYDVRKMIAKSEQEIGKATAKYFFYSNIMNFFKTEITLANGEIRKRPLIETNGETGEIVWDKGRDFATVRKVLSMPQVNIVKKTEVQTGGFSKESILPKRNSDKLIARKKDWDPKKYGGFDSPTVAYSVLVVAKVEKGKSKKLKSVKELLGITIMERSSFEKNPIDFLEAKGYKEVKKDLIIKLPKYSLFELENGRKRMLASAGELQKGNELALPSKYVNFLYLASHYEKLKGSPEDNEQKQLFVEQHKHYLDEIIEQISEFSKRVILADANLDKVLSAYNKHRDKPIREQAENIIHLFTLTNLGAPAAFKYFDTTIDRKRYTSTKEVLDATLIHQSITGLYETRIDLSQLGGD

SEQ ID NO: 227 - protein, 1554 aa, Artificial Sequence
  Description of artificial sequence: 126 TadA CP65ins 1003 polypeptide sequence
MDKKYSIGLAIGTNSVGWAVITDEYKVPSKKFKVLGNTDRHSIKKNLIGALLFDSGETAEATRLKRTARRRYTRRKNRICYLQEIFSNEMAKVDDSFFHRLEESFLVEEDKKHERHPIFGNIVDEVAYHEKYPTIYHLRKKLVDSTDKADLRLIYLALAHMIKFRGHFLIEGDLNPDNSDVDKLFIQLVQTYNQLFEENPINASGVDAKAILSARLSKSRRLENLIAQLPGEKKNGLFGNLIALSLGLTPNFKSNFDLAEDAKLQLSKDTYDDDLDNLLAQIGDQYADLFLAAKNLSDAILLSDILRVNTEITKAPLSASMIKRYDEHHQDLTLLKALVRQQLPEKYKEIFFDQSKNGYAGYIDGGASQEEFYKFIKPILEKMDGTEELLVKLNREDLLRKQRTFDNGSIPHQIHLGELHAILRRQEDFYPFLKDNREKIEKILTFRIPYYVGPLARGNSRFAWMTRKSEETITPWNFEEVVDKGASAQSFIERMTNFDKNLPNEKVLPKHSLLYEYFTVYNELTKVKYVTEGMRKPAFLSGEQKKAIVDLLFKTNRKVTVKQLKEDYFKKIECFDSVEISGVEDRFNASLGTYHDLLKIIKDKDFLDNEENEDILEDIVLTLTLFEDREMIEERLKTYAHLFDDKVMKQLKRRRYTGWGRLSRKLINGIRDKQSGKTILDFLKSDGFANRNFMQLIHDDSLTFKEDIQKAQVSGQGDSLHEHIANLAGSPAIKKGILQTVKVVDELVKVMGRHKPENIVIEMARENQTTQKGQKNSRERMKRIEEGIKELGSQILKEHPVENTQLQNEKLYLYYLQNGRDMYVDQELDINRLSDYDVDHIVPQSFLKDDSIDNKVLTRSDKNRGKSDNVPSEEVVKKMKNYWRQLLNAKLITQRKFDNLTKAERGGLSELDKAGFIKRQLVETRQITKHVAQILDSRMNTKYDENDKLIREVKVITLKSKLVSDFRKDFQFYKVREINNYHHAHDAYLNAVVGTALIKKYPKTAHAEIMALRQGGLVMQNYRLIDATLYVTFEPCVMCAGAMIHSRIGRVVFGVRNAKTGAAGSLMDVLHYPGMNHRVEITEGILADECAALLCYFFRMPRQVFNAQKKAQSSTDGSSGSETPGTSESATPESSGSEVEFSHEYWMRHALTLAKRARDEREVPVGAVLVLNNRVIGEGWNRAIGLHDPLESEFVYGDYKVYDVRKMIAKSEQEIGKATAKYFFYSNIMNFFKTEITLANGEIRKRPLIETNGETGEIVWDKGRDFATVRKVLSMPQVNIVKKTEVQTGGFSKESILPKRNSDKLIARKKDWDPKKYGGFDSPTVAYSVLVVAKVEKGKSKKLKSVKELLGITIMERSSFEKNPIDFLEAKGYKEVKKDLIIKLPKYSLFELENGRKRMLASAGELQKGNELALPSKYVNFLYLASHYEKLKGSPEDNEQKQLFVEQHKHYLDEIIEQISEFSKRVILADANLDKVLSAYNKHRDKPIREQAENIIHLFTLTNLGAPAAFKYFDTTIDRKRYTSTKEVLDATLIHQSITGLYETRIDLSQLGGD

SEQ ID NO: 228 - protein, 1554 aa, Artificial Sequence
  Description of artificial sequence: 127 TadA CP65ins 1016 polypeptide sequence
MDKKYSIGLAIGTNSVGWAVITDEYKVPSKKFKVLGNTDRHSIKKNLIGALLFDSGETAEATRLKRTARRRYTRRKNRICYLQEIFSNEMAKVDDSFFHRLEESFLVEEDKKHERHPIFGNIVDEVAYHEKYPTIYHLRKKLVDSTDKADLRLIYLALAHMIKFRGHFLIEGDLNPDNSDVDKLFIQLVQTYNQLFEENPINASGVDAKAILSARLSKSRRLENLIAQLPGEKKNGLFGNLIALSLGLTPNFKSNFDLAEDAKLQLSKDTYDDDLDNLLAQIGDQYADLFLAAKNLSDAILLSDILRVNTEITKAPLSASMIKRYDEHHQDLTLLKALVRQQLPEKYKEIFFDQSKNGYAGYIDGGASQEEFYKFIKPILEKMDGTEELLVKLNREDLLRKQRTFDNGSIPHQIHLGELHAILRRQEDFYPFLKDNREKIEKILTFRIPYYVGPLARGNSRFAWMTRKSEETITPWNFEEVVDKGASAQSFIERMTNFDKNLPNEKVLPKHSLLYEYFTVYNELTKVKYVTEGMRKPAFLSGEQKKAIVDLLFKTNRKVTVKQLKEDYFKKIECFDSVEISGVEDRFNASLGTYHDLLKIIKDKDFLDNEENEDILEDIVLTLTLFEDREMIEERLKTYAHLFDDKVMKQLKRRRYTGWGRLSRKLINGIRDKQSGKTILDFLKSDGFANRNFMQLIHDDSLTFKEDIQKAQVSGQGDSLHEHIANLAGSPAIKKGILQTVKVVDELVKVMGRHKPENIVIEMARENQTTQKGQKNSRERMKRIEEGIKELGSQILKEHPVENTQLQNEKLYLYYLQNGRDMYVDQELDINRLSDYDVDHIVPQSFLKDDSIDNKVLTRSDKNRGKSDNVPSEEVVKKMKNYWRQLLNAKLITQRKFDNLTKAERGGLSELDKAGFIKRQLVETRQITKHVAQILDSRMNTKYDENDKLIREVKVITLKSKLVSDFRKDFQFYKVREINNYHHAHDAYLNAVVGTALIKKYPKLESEFVYGDYKVTAHAEIMALRQGGLVMQNYRLIDATLYVTFEPCVMCAGAMIHSRIGRVVFGVRNAKTGAAGSLMDVLHYPGMNHRVEITEGILADECAALLCYFFRMPRQVFNAQKKAQSSTDGSSGSETPGTSESATPESSGSEVEFSHEYWMRHALTLAKRARDEREVPVGAVLVLNNRVIGEGWNRAIGLHDPYDVRKMIAKSEQEIGKATAKYFFYSNIMNFFKTEITLANGEIRKRPLIETNGETGEIVWDKGRDFATVRKVLSMPQVNIVKKTEVQTGGFSKESILPKRNSDKLIARKKDWDPKKYGGFDSPTVAYSVLVVAKVEKGKSKKLKSVKELLGITIMERSSFEKNPIDFLEAKGYKEVKKDLIIKLPKYSLFELENGRKRMLASAGELQKGNELALPSKYVNFLYLASHYEKLKGSPEDNEQKQLFVEQHKHYLDEIIEQISEFSKRVILADANLDKVLSAYNKHRDKPIREQAENIIHLFTLTNLGAPAAFKYFDTTIDRKRYTSTKEVLDATLIHQSITGLYETRIDLSQLGGD

SEQ ID NO: 229 - protein, 1554 aa, Artificial Sequence
  Description of artificial sequence: 128 TadA CP65ins 1022 polypeptide sequence
MDKKYSIGLAIGTNSVGWAVITDEYKVPSKKFKVLGNTDRHSIKKNLIGALLFDSGETAEATRLKRTARRRYTRRKNRICYLQEIFSNEMAKVDDSFFHRLEESFLVEEDKKHERHPIFGNIVDEVAYHEKYPTIYHLRKKLVDSTDKADLRLIYLALAHMIKFRGHFLIEGDLNPDNSDVDKLFIQLVQTYNQLFEENPINASGVDAKAILSARLSKSRRLENLIAQLPGEKKNGLFGNLIALSLGLTPNFKSNFDLAEDAKLQLSKDTYDDDLDNLLAQIGDQYADLFLAAKNLSDAILLSDILRVNTEITKAPLSASMIKRYDEHHQDLTLLKALVRQQLPEKYKEIFFDQSKNGYAGYIDGGASQEEFYKFIKPILEKMDGTEELLVKLNREDLLRKQRTFDNGSIPHQIHLGELHAILRRQEDFYPFLKDNREKIEKILTFRIPYYVGPLARGNSRFAWMTRKSEETITPWNFEEVVDKGASAQSFIERMTNFDKNLPNEKVLPKHSLLYEYFTVYNELTKVKYVTEGMRKPAFLSGEQKKAIVDLLFKTNRKVTVKQLKEDYFKKIECFDSVEISGVEDRFNASLGTYHDLLKIIKDKDFLDNEENEDILEDIVLTLTLFEDREMIEERLKTYAHLFDDKVMKQLKRRRYTGWGRLSRKLINGIRDKQSGKTILDFLKSDGFANRNFMQLIHDDSLTFKEDIQKAQVSGQGDSLHEHIANLAGSPAIKKGILQTVKVVDELVKVMGRHKPENIVIEMARENQTTQKGQKNSRERMKRIEEGIKELGSQILKEHPVENTQLQNEKLYLYYLQNGRDMYVDQELDINRLSDYDVDHIVPQSFLKDDSIDNKVLTRSDKNRGKSDNVPSEEVVKKMKNYWRQLLNAKLITQRKFDNLTKAERGGLSELDKAGFIKRQLVETRQITKHVAQILDSRMNTKYDENDKLIREVKVITLKSKLVSDFRKDFQFYKVREINNYHHAHDAYLNAVVGTALIKKYPKLESEFVYGDYKVYDVRKMITAHAEIMALRQGGLVMQNYRLIDATLYVTFEPCVMCAGAMIHSRIGRVVFGVRNAKTGAAGSLMDVLHYPGMNHRVEITEGILADECAALLCYFFRMPRQVFNAQKKAQSSTDGSSGSETPGTSESATPESSGSEVEFSHEYWMRHALTLAKRARDEREVPVGAVLVLNNRVIGEGWNRAIGLHDPAKSEQEIGKATAKYFFYSNIMNFFKTEITLANGEIRKRPLIETNGETGEIVWDKGRDFATVRKVLSMPQVNIVKKTEVQTGGFSKESILPKRNSDKLIARKKDWDPKKYGGFDSPTVAYSVLVVAKVEKGKSKKLKSVKELLGITIMERSSFEKNPIDFLEAKGYKEVKKDLIIKLPKYSLFELENGRKRMLASAGELQKGNELALPSKYVNFLYLASHYEKLKGSPEDNEQKQLFVEQHKHYLDEIIEQISEFSKRVILADANLDKVLSAYNKHRDKPIREQAENIIHLFTLTNLGAPAAFKYFDTTIDRKRYTSTKEVLDATLIHQSITGLYETRIDLSQLGGD

SEQ ID NO: 230 - protein, 1554 aa, Artificial Sequence
  Description of artificial sequence: 129 TadA CP65ins 1029 polypeptide sequence
MDKKYSIGLAIGTNSVGWAVITDEYKVPSKKFKVLGNTDRHSIKKNLIGALLFDSGETAEATRLKRTARRRYTRRKNRICYLQEIFSNEMAKVDDSFFHRLEESFLVEEDKKHERHPIFGNIVDEVAYHEKYPTIYHLRKKLVDSTDKADLRLIYLALAHMIKFRGHFLIEGDLNPDNSDVDKLFIQLVQTYNQLFEENPINASGVDAKAILSARLSKSRRLENLIAQLPGEKKNGLFGNLIALSLGLTPNFKSNFDLAEDAKLQLSKDTYDDDLDNLLAQIGDQYADLFLAAKNLSDAILLSDILRVNTEITKAPLSASMIKRYDEHHQDLTLLKALVRQQLPEKYKEIFFDQSKNGYAGYIDGGASQEEFYKFIKPILEKMDGTEELLVKLNREDLLRKQRTFDNGSIPHQIHLGELHAILRRQEDFYPFLKDNREKIEKILTFRIPYYVGPLARGNSRFAWMTRKSEETITPWNFEEVVDKGASAQSFIERMTNFDKNLPNEKVLPKHSLLYEYFTVYNELTKVKYVTEGMRKPAFLSGEQKKAIVDLLFKTNRKVTVKQLKEDYFKKIECFDSVEISGVEDRFNASLGTYHDLLKIIKDKDFLDNEENEDILEDIVLTLTLFEDREMIEERLKTYAHLFDDKVMKQLKRRRYTGWGRLSRKLINGIRDKQSGKTILDFLKSDGFANRNFMQLIHDDSLTFKEDIQKAQVSGQGDSLHEHIANLAGSPAIKKGILQTVKVVDELVKVMGRHKPENIVIEMARENQTTQKGQKNSRERMKRIEEGIKELGSQILKEHPVENTQLQNEKLYLYYLQNGRDMYVDQELDINRLSDYDVDHIVPQSFLKDDSIDNKVLTRSDKNRGKSDNVPSEEVVKKMKNYWRQLLNAKLITQRKFDNLTKAERGGLSELDKAGFIKRQLVETRQITKHVAQILDSRMNTKYDENDKLIREVKVITLKSKLVSDFRKDFQFYKVREINNYHHAHDAYLNAVVGTALIKKYPKLESEFVYGDYKVYDVRKMIAKSEQEITAHAEIMALRQGGLVMQNYRLIDATLYVTFEPCVMCAGAMIHSRIGRVVFGVRNAKTGAAGSLMDVLHYPGMNHRVEITEGILADECAALLCYFFRMPRQVFNAQKKAQSSTDGSSGSETPGTSESATPESSGSEVEFSHEYWMRHALTLAKRARDEREVPVGAVLVLNNRVIGEGWNRAIGLHDPGKATAKYFFYSNIMNFFKTEITLANGEIRKRPLIETNGETGEIVWDKGRDFATVRKVLSMPQVNIVKKTEVQTGGFSKESILPKRNSDKLIARKKDWDPKKYGGFDSPTVAYSVLVVAKVEKGKSKKLKSVKELLGITIMERSSFEKNPIDFLEAKGYKEVKKDLIIKLPKYSLFELENGRKRMLASAGELQKGNELALPSKYVNFLYLASHYEKLKGSPEDNEQKQLFVEQHKHYLDEIIEQISEFSKRVILADANLDKVLSAYNKHRDKPIREQAENIIHLFTLTNLGAPAAFKYFDTTIDRKRYTSTKEVLDATLIHQSITGLYETRIDLSQLGGD

SEQ ID NO: 231 - protein, 1554 aa, Artificial Sequence
  Description of artificial sequence: 130 TadA CP65ins 1041 polypeptide sequence
MDKKYSIGLAIGTNSVGWAVITDEYKVPSKKFKVLGNTDRHSIKKNLIGALLFDSGETAEATRLKRTARRRYTRRKNRICYLQEIFSNEMAKVDDSFFHRLEESFLVEEDKKHERHPIFGNIVDEVAYHEKYPTIYHLRKKLVDSTDKADLRLIYLALAHMIKFRGHFLIEGDLNPDNSDVDKLFIQLVQTYNQLFEENPINASGVDAKAILSARLSKSRRLENLIAQLPGEKKNGLFGNLIALSLGLTPNFKSNFDLAEDAKLQLSKDTYDDDLDNLLAQIGDQYADLFLAAKNLSDAILLSDILRVNTEITKAPLSASMIKRYDEHHQDLTLLKALVRQQLPEKYKEIFFDQSKNGYAGYIDGGASQEEFYKFIKPILEKMDGTEELLVKLNREDLLRKQRTFDNGSIPHQIHLGELHAILRRQEDFYPFLKDNREKIEKILTFRIPYYVGPLARGNSRFAWMTRKSEETITPWNFEEVVDKGASAQSFIERMTNFDKNLPNEKVLPKHSLLYEYFTVYNELTKVKYVTEGMRKPAFLSGEQKKAIVDLLFKTNRKVTVKQLKEDYFKKIECFDSVEISGVEDRFNASLGTYHDLLKIIKDKDFLDNEENEDILEDIVLTLTLFEDREMIEERLKTYAHLFDDKVMKQLKRRRYTGWGRLSRKLINGIRDKQSGKTILDFLKSDGFANRNFMQLIHDDSLTFKEDIQKAQVSGQGDSLHEHIANLAGSPAIKKGILQTVKVVDELVKVMGRHKPENIVIEMARENQTTQKGQKNSRERMKRIEEGIKELGSQILKEHPVENTQLQNEKLYLYYLQNGRDMYVDQELDINRLSDYDVDHIVPQSFLKDDSIDNKVLTRSDKNRGKSDNVPSEEVVKKMKNYWRQLLNAKLITQRKFDNLTKAERGGLSELDKAGFIKRQLVETRQITKHVAQILDSRMNTKYDENDKLIREVKVITLKSKLVSDFRKDFQFYKVREINNYHHAHDAYLNAVVGTALIKKYPKLESEFVYGDYKVYDVRKMIAKSEQEIGKATAKYFFYSTAHAEIMALRQGGLVMQNYRLIDATLYVTFEPCVMCAGAMIHSRIGRVVFGVRNAKTGAAGSLMDVLHYPGMNHRVEITEGILADECAALLCYFFRMPRQVFNAQKKAQSSTDGSSGSETPGTSESATPESSGSEVEFSHEYWMRHALTLAKRARDEREVPVGAVLVLNNRVIGEGWNRAIGLHDPNIMNFFKTEITLANGEIRKRPLIETNGETGEIVWDKGRDFATVRKVLSMPQVNIVKKTEVQTGGFSKESILPKRNSDKLIARKKDWDPKKYGGFDSPTVAYSVLVVAKVEKGKSKKLKSVKELLGITIMERSSFEKNPIDFLEAKGYKEVKKDLIIKLPKYSLFELENGRKRMLASAGELQKGNELALPSKYVNFLYLASHYEKLKGSPEDNEQKQLFVEQHKHYLDEIIEQISEFSKRVILADANLDKVLSAYNKHRDKPIREQAENIIHLFTLTNLGAPAAFKYFDTTIDRKRYTSTKEVLDATLIHQSITGLYETRIDLSQLGGD

SEQ ID NO: 232 - protein, 1554 aa, Artificial Sequence
  Description of artificial sequence: 131 TadA CP65ins 1054 polypeptide sequence
MDKKYSIGLAIGTNSVGWAVITDEYKVPSKKFKVLGNTDRHSIKKNLIGALLFDSGETAEATRLKRTARRRYTRRKNRICYLQEIFSNEMAKVDDSFFHRLEESFLVEEDKKHERHPIFGNIVDEVAYHEKYPTIYHLRKKLVDSTDKADLRLIYLALAHMIKFRGHFLIEGDLNPDNSDVDKLFIQLVQTYNQLFEENPINASGVDAKAILSARLSKSRRLENLIAQLPGEKKNGLFGNLIALSLGLTPNFKSNFDLAEDAKLQLSKDTYDDDLDNLLAQIGDQYADLFLAAKNLSDAILLSDILRVNTEITKAPLSASMIKRYDEHHQDLTLLKALVRQQLPEKYKEIFFDQSKNGYAGYIDGGASQEEFYKFIKPILEKMDGTEELLVKLNREDLLRKQRTFDNGSIPHQIHLGELHAILRRQEDFYPFLKDNREKIEKILTFRIPYYVGPLARGNSRFAWMTRKSEETITPWNFEEVVDKGASAQSFIERMTNFDKNLPNEKVLPKHSLLYEYFTVYNELTKVKYVTEGMRKPAFLSGEQKKAIVDLLFKTNRKVTVKQLKEDYFKKIECFDSVEISGVEDRFNASLGTYHDLLKIIKDKDFLDNEENEDILEDIVLTLTLFEDREMIEERLKTYAHLFDDKVMKQLKRRRYTGWGRLSRKLINGIRDKQSGKTILDFLKSDGFANRNFMQLIHDDSLTFKEDIQKAQVSGQGDSLHEHIANLAGSPAIKKGILQTVKVVDELVKVMGRHKPENIVIEMARENQTTQKGQKNSRERMKRIEEGIKELGSQILKEHPVENTQLQNEKLYLYYLQNGRDMYVDQELDINRLSDYDVDHIVPQSFLKDDSIDNKVLTRSDKNRGKSDNVPSEEVVKKMKNYWRQLLNAKLITQRKFDNLTKAERGGLSELDKAGFIKRQLVETRQITKHVAQILDSRMNTKYDENDKLIREVKVITLKSKLVSDFRKDFQFYKVREINNYHHAHDAYLNAVVGTALIKKYPKLESEFVYGDYKVYDVRKMIAKSEQEIGKATAKYFFYSNIMNFFKTEITLANTAHAEIMALRQGGLVMQNYRLIDATLYVTFEPCVMCAGAMIHSRIGRVVFGVRNAKTGAAGSLMDVLHYPGMNHRVEITEGILADECAALLCYFFRMPRQVFNAQKKAQSSTDGSSGSETPGTSESATPESSGSEVEFSHEYWMRHALTLAKRARDEREVPVGAVLVLNNRVIGEGWNRAIGLHDPGEIRKRPLIETNGETGEIVWDKGRDFATVRKVLSMPQVNIVKKTEVQTGGFSKESILPKRNSDKLIARKKDWDPKKYGGFDSPTVAYSVLVVAKVEKGKSKKLKSVKELLGITIMERSSFEKNPIDFLEAKGYKEVKKDLIIKLPKYSLFELENGRKRMLASAGELQKGNELALPSKYVNFLYLASHYEKLKGSPEDNEQKQLFVEQHKHYLDEIIEQISEFSKRVILADANLDKVLSAYNKHRDKPIREQAENIIHLFTLTNLGAPAAFKYFDTTIDRKRYTSTKEVLDATLIHQSITGLYETRIDLSQLGGD

SEQ ID NO: 233 - protein, 1554 aa, Artificial Sequence
  Description of artificial sequence: 132 TadA CP65ins 1246 polypeptide sequence
MDKKYSIGLAIGTNSVGWAVITDEYKVPSKKFKVLGNTDRHSIKKNLIGALLFDSGETAEATRLKRTARRRYTRRKNRICYLQEIFSNEMAKVDDSFFHRLEESFLVEEDKKHERHPIFGNIVDEVAYHEKYPTIYHLRKKLVDSTDKADLRLIYLALAHMIKFRGHFLIEGDLNPDNSDVDKLFIQLVQTYNQLFEENPINASGVDAKAILSARLSKSRRLENLIAQLPGEKKNGLFGNLIALSLGLTPNFKSNFDLAEDAKLQLSKDTYDDDLDNLLAQIGDQYADLFLAAKNLSDAILLSDILRVNTEITKAPLSASMIKRYDEHHQDLTLLKALVRQQLPEKYKEIFFDQSKNGYAGYIDGGASQEEFYKFIKPILEKMDGTEELLVKLNREDLLRKQRTFDNGSIPHQIHLGELHAILRRQEDFYPFLKDNREKIEKILTFRIPYYVGPLARGNSRFAWMTRKSEETITPWNFEEVVDKGASAQSFIERMTNFDKNLPNEKVLPKHSLLYEYFTVYNELTKVKYVTEGMRKPAFLSGEQKKAIVDLLFKTNRKVTVKQLKEDYFKKIECFDSVEISGVEDRFNASLGTYHDLLKIIKDKDFLDNEENEDILEDIVLTLTLFEDREMIEERLKTYAHLFDDKVMKQLKRRRYTGWGRLSRKLINGIRDKQSGKTILDFLKSDGFANRNFMQLIHDDSLTFKEDIQKAQVSGQGDSLHEHIANLAGSPAIKKGILQTVKVVDELVKVMGRHKPENIVIEMARENQTTQKGQKNSRERMKRIEEGIKELGSQILKEHPVENTQLQNEKLYLYYLQNGRDMYVDQELDINRLSDYDVDHIVPQSFLKDDSIDNKVLTRSDKNRGKSDNVPSEEVVKKMKNYWRQLLNAKLITQRKFDNLTKAERGGLSELDKAGFIKRQLVETRQITKHVAQILDSRMNTKYDENDKLIREVKVITLKSKLVSDFRKDFQFYKVREINNYHHAHDAYLNAVVGTALIKKYPKLESEFVYGDYKVYDVRKMIAKSEQEIGKATAKYFFYSNIMNFFKTEITLANGEIRKRPLIETNGETGEIVWDKGRDFATVRKVLSMPQVNIVKKTEVQTGGFSKESILPKRNSDKLIARKKDWDPKKYGGFDSPTVAYSVLVVAKVEKGKSKKLKSVKELLGITIMERSSFEKNPIDFLEAKGYKEVKKDLIIKLPKYSLFELENGRKRMLASAGELQKGNELALPSKYVNFLYLASHYEKLKGTAHAEIMALRQGGLVMQNYRLIDATLYVTFEPCVMCAGAMIHSRIGRVVFGVRNAKTGAAGSLMDVLHYPGMNHRVEITEGILADECAALLCYFFRMPRQVFNAQKKAQSSTDGSSGSETPGTSESATPESSGSEVEFSHEYWMRHALTLAKRARDEREVPVGAVLVLNNRVIGEGWNRAIGLHDPSPEDNEQKQLFVEQHKHYLDEIIEQISEFSKRVILADANLDKVLSAYNKHRDKPIREQAENIIHLFTLTNLGAPAAFKYFDTTIDRKRYTSTKEVLDATLIHQSITGLYETRIDLSQLGGD

SEQ ID NO: 234 - protein, 160 aa, Staphylococcus aureus
  MISC_FEATURE (1)..(160): TadA polypeptide sequence
MGSHMTNDIYFMTLAIEEAKKAAQLGEVPIGAIITKDDEVIARAHNLRETLQQPTAHAEHIAIERAAKVLGSWRLEGCTLYVTLEPCVMCAGTIVMSRIPRVVYGADDPKGGCSGSLMNLLQQSNFNHRAIVDKGVLKEACSTLLTTFFKNLRANKKSTN

SEQ ID NO: 235 - protein, 161 aa, Bacillus subtilis
  MISC_FEATURE (1)..(161): TadA polypeptide sequence
MTQDELYMKEAIKEAKKAEEKGEVPIGAVLVINGEIIARAHNLRETEQRSIAHAEMLVIDEACKALGTWRLEGATLYVTLEPCPMCAGAVVLSRVEKVVFGAFDPKGGCSGTLMNLLQEERFNHQAEVVSGVLEEECGGMLSAFFRELRKKKKAARKNLSE

SEQ ID NO: 236 - protein, 183 aa, Salmonella typhimurium
  MISC_FEATURE (1)..(183): TadA polypeptide sequence
MPPAFITGVTSLSDVELDHEYWMRHALTLAKRAWDEREVPVGAVLVHNHRVIGEGWNRPIGRHDPTAHAEIMALRQGGLVLQNYRLLDTTLYVTLEPCVMCAGAMVHSRIGRVVFGARDAKTGAAGSLIDVLHHPGMNHRVEIIEGVLRDECATLLSDFFRMRRQEIKALKKADRAEGAGPAV

SEQ ID NO: 237 - protein, 164 aa, Shewanella putrefaciens
  MISC_FEATURE (1)..(164): TadA polypeptide sequence
MDEYWMQVAMQMAEKAEAAGEVPVGAVLVKDGQQIATGYNLSISQHDPTAHAEILCLRSAGKKLENYRLLDATLYITLEPCAMCAGAMVHSRIARVVYGARDEKTGAAGTVVNLLQHPAFNHQVEVTSGVLAEACSAQLSRFFKRRRDEKKALKLAQRAQQGIE

SEQ ID NO: 238 - protein, 173 aa, Haemophilus influenzae
  MISC_FEATURE (1)..(173): TadA polypeptide sequence
MDAAKVRSEFDEKMMRYALELADKAEALGEIPVGAVLVDDARNIIGEGWNLSIVQSDPTAHAEIIALRNGAKNIQNYRLLNSTLYVTLEPCTMCAGAILHSRIKRLVFGASDYKTGAIGSRFHFFDDYKMNHTLEITSGVLAEECSQKLSTFFQKRREEKKIEKALLKSLSDK

SEQ ID NO: 239 - protein, 161 aa, Caulobacter crescentus
  MISC_FEATURE (1)..(161): TadA polypeptide sequence
MRTDESEDQDHRMMRLALDAARAAAEAGETPVGAVILDPSTGEVIATAGNGPIAAHDPTAHAEIAAMRAAAAKLGNYRLTDLTLVVTLEPCAMCAGAISHARIGRVVFGADDPKGGAVVHGPKFFAQPTCHWRPEVTGGVLADESADLLRGFFRARRKAKI

SEQ ID NO: 240 - protein, 179 aa, Geobacter sulfurreducens
  MISC_FEATURE (1)..(179): TadA polypeptide sequence
MSSLKKTPIRDDAYWMGKAIREAAKAAARDEVPIGAVIVRDGAVIGRGHNLREGSNDPSAHAEMIAIRQAARRSANWRLTGATLYVTLEPCLMCMGAIILARLERVVFGCYDPKGGAAGSLYDLSADPRLNHQVRLSPGVCQEECGTMLSDFFRDLRRRKKAKATPALFIDERKVPPEP

SEQ ID NO: 241 - protein, 167 aa, Escherichia coli; identical to SEQ ID NO: 3
  MISC_FEATURE (1)..(167): ecTadA polypeptide sequence

SEQ ID NO: 242 - protein, 167 aa, Artificial Sequence
  Description of artificial sequence: TadA*8 polypeptide sequence
MSEVEFSHEYWMRHALTLAKRARDEREVPVGAVLVLNNRVIGEGWNRAIGLHDPTAHAEIMALRQGGLVMQNYRLIDATLYVTFEPCVMCAGAMIHSRIGRVVFGVRNAKTGAAGSLMDVLHYPGMNHRVEITEGILADECAALLCTFFRMPRQVFNAQKKAQSSTD

SEQ ID NO: 243 - RNA, 80 nt, Artificial Sequence
  Description of artificial sequence: gRNA scaffold polynucleotide sequence
guuuuagagcuagaaauagcaaguuaaaauaaggcuaguccguuaucaacuugaaaaaguggcaccgagucggugcuuuu

SEQ ID NO: 244 - RNA, 125 nt, Artificial Sequence
  Description of artificial sequence: gRNA scaffold polynucleotide sequence
guuuuuguacucucaagauuuaaguaacuguacaacgaaacuuacacaguuacuuaaaucuugcagaagcuacaaagauaaggcuucaugccgaaaucaacacccugucauuuuauggcagggug

SEQ ID NO: 245 - RNA, 76 nt, S. pyogenes
  misc_feature (1)..(76): S. pyogenes gRNA scaffold ologonucleotide sequence
guuuuagagcuagaaauagcaaguuaaaauaaggcuaguccguuaucaacuugaaaaaguggcaccgagucggugc

SEQ ID NO: 246 - RNA, 84 nt, S. aureus
  misc_feature (1)..(84): S. aureus gRNA scaffold oligonucleotide sequence
guuuuaguacucuguaaugaaaauuacagaaucuacuaaaacaaggcaaaaugccguguuuaucucgucaacuuguuggcgaga

SEQ ID NO: 247 - RNA, 97 nt, Bacillus hisashii
  misc_feature (1)..(97): BhCas12b gRNA scaffold oligonucleotide sequence
guucugucuuuuggucaggacaaccgucuagcuauaagugcugcagggugugagaaacuccuauugcuggacgaugucucuuacgaggcauuagcac

SEQ ID NO: 248 - RNA, 88 nt, Bacillus sp.
  misc_feature (1)..(88): BvCas12b gRNA scaffold oligonucleotide sequence
gaccuauagggucaaugaaucugugcgugugccauaaguaauuaaaaauuacccaccacaggagcaccugaaaacaggugcuuggcac

SEQ ID NO: 249 - RNA, 80 nt, Artificial Sequence; identical to SEQ ID NO: 243
  Description of artificial sequence: gRNA scaffold nucleotide sequence
  misc_feature (78)..(80): In embodiments, a nucleotide(s) is linked to the preceding 5' nucleotide by a 3' phosphorothioate internucleotide liknage
  modified_base (78)..(80): um

SEQ ID NO: 250 - RNA, 117 nt, Bacillus hisashii
  misc_feature (1)..(117): BhCas12b gRNA scaffold + guide sequence; oligonucleotide sequence
  misc_feature (1)..(97): BhCas12b sgRNA scaffold
  modified_base (98)..(117): a, c, t, or g
guucugucuuuuggucaggacaaccgucuagcuauaagugcugcagggugugagaaacuccuauugcuggacgaugucucuuacgaggcauuagcacnnnnnnnnnnnnnnnnnnnn

SEQ ID NO: 251 - RNA, 108 nt, Bacillus sp.
  misc_feature (1)..(108): BvCas12b gRNA scaffold + guide sequence; oligonucleotide sequence
  misc_feature (1)..(88): BvCas12b gRNA scaffold
  modified_base (89)..(108): a, c, t, or g
gaccuauagggucaaugaaucugugcgugugccauaaguaauuaaaaauuacccaccacaggagcaccugaaaacaggugcuuggcacnnnnnnnnnnnnnnnnnnnn

SEQ ID NO: 252 - RNA, 119 nt, Alicyclobacillus acidiphilus
  misc_feature (1)..(119): AaCas12b gRNA scaffold + guide sequence; oligonucleotide sequence
  misc_feature (1)..(99): AaCas12b gRNA scaffold
  modified_base (100)..(119): a, c, t, or g
gucuaaaggacagaauuuuucaacgggugugccaauggccacuuuccagguggcaaagcccguugaacuucucaaaaagaacgaucugagaaguggcacnnnnnnnnnnnnnnnnnnnn

SEQ ID NO: 253 - protein, 29 aa, Artificial Sequence
  Description of artificial sequence: synthetic polypeptide sequence
PKKKRKVEGADKRTADGSEFESPKKKRKV

SEQ ID NO: 254 - protein, 23 aa, Artificial Sequence
  Description of artificial sequence: synthetic peptide sequence
RKSGKIAAIVVKRPRKPKKKRKV

SEQ ID NO: 255 - protein, 8 aa, Artificial Sequence
  Description of artificial sequence: synthetic peptide sequence
SGGSSGGS

SEQ ID NO: 256 - protein, 1609 aa, Artificial Sequence
  Description of artificial sequence: pNMG-B335 ABE8.1_Y147T_CP5_NGC PAM_monomer polypeptide sequence
MSEVEFSHEYWMRHALTLAKRARDEREVPVGAVLVLNNRVIGEGWNRAIGLHDPTAHAEIMALRQGGLVMQNYRLIDATLYVTFEPCVMCAGAMIHSRIGRVVFGVRNAKTGAAGSLMDVLHYPGMNHRVEITEGILADECAALLCTFFRMPRQVFNAQKKAQSSTDSGGSSGGSSGSETPGTSESATPESSGGSSGGSEIGKATAKYFFYSNIMNFFKTEITLANGEIRKRPLIETNGETGEIVWDKGRDFATVRKVLSMPQVNIVKKTEVQTGGFSKESILPKRNSDKLIARKKDWDPKKYGGFMQPTVAYSVLVVAKVEKGKSKKLKSVKELLGITIMERSSFEKNPIDFLEAKGYKEVKKDLIIKLPKYSLFELENGRKRMLASAKFLQKGNELALPSKYVNFLYLASHYEKLKGSPEDNEQKQLFVEQHKHYLDEIIEQISEFSKRVILADANLDKVLSAYNKHRDKPIREQAENIIHLFTLTNLGAPRAFKYFDTTIARKEYRSTKEVLDATLIHQSITGLYETRIDLSQLGGDGGSGGSGGSGGSGGSGGSGGMDKKYSIGLAIGTNSVGWAVITDEYKVPSKKFKVLGNTDRHSIKKNLIGALLFDSGETAEATRLKRTARRRYTRRKNRICYLQEIFSNEMAKVDDSFFHRLEESFLVEEDKKHERHPIFGNIVDEVAYHEKYPTIYHLRKKLVDSTDKADLRLIYLALAHMIKFRGHFLIEGDLNPDNSDVDKLFIQLVQTYNQLFEENPINASGVDAKAILSARLSKSRRLENLIAQLPGEKKNGLFGNLIALSLGLTPNFKSNFDLAEDAKLQLSKDTYDDDLDNLLAQIGDQYADLFLAAKNLSDAILLSDILRVNTEITKAPLSASMIKRYDEHHQDLTLLKALVRQQLPEKYKEIFFDQSKNGYAGYIDGGASQEEFYKFIKPILEKMDGTEELLVKLNREDLLRKQRTFDNGSIPHQIHLGELHAILRRQEDFYPFLKDNREKIEKILTFRIPYYVGPLARGNSRFAWMTRKSEETITPWNFEEVVDKGASAQSFIERMTNFDKNLPNEKVLPKHSLLYEYFTVYNELTKVKYVTEGMRKPAFLSGEQKKAIVDLLFKTNRKVTVKQLKEDYFKKIECFDSVEISGVEDRFNASLGTYHDLLKIIKDKDFLDNEENEDILEDIVLTLTLFEDREMIEERLKTYAHLFDDKVMKQLKRRRYTGWGRLSRKLINGIRDKQSGKTILDFLKSDGFANRNFMQLIHDDSLTFKEDIQKAQVSGQGDSLHEHIANLAGSPAIKKGILQTVKVVDELVKVMGRHKPENIVIEMARENQTTQKGQKNSRERMKRIEEGIKELGSQILKEHPVENTQLQNEKLYLYYLQNGRDMYVDQELDINRLSDYDVDHIVPQSFLKDDSIDNKVLTRSDKNRGKSDNVPSEEVVKKMKNYWRQLLNAKLITQRKFDNLTKAERGGLSELDKAGFIKRQLVETRQITKHVAQILDSRMNTKYDENDKLIREVKVITLKSKLVSDFRKDFQFYKVREINNYHHAHDAYLNAVVGTALIKKYPKLESEFVYGDYKVYDVRKMIAKSEQEGADKRTADGSEFESPKKKRKV

SEQ ID NO: 257 - protein, 1807 aa, Artificial Sequence
  Description of artificial sequence: pNMG-357_ABE8.14 with NGC PAM CP5 polypeptide sequence
  MISC_FEATURE (1)..(174): Adenosine deaminase sequence
  MISC_FEATURE (175)..(198): Linker sequence
  MISC_FEATURE (199)..(365): Adenosine deaminase sequence
  MISC_FEATURE (366)..(397): Linker sequence
  MISC_FEATURE (398)..(738): Sequence derived from Cas9
  MISC_FEATURE (739)..(759): Linker sequence
  MISC_FEATURE (760)..(1785): Sequence derived from Cas9
  MISC_FEATURE (1786)..(1807): Bipartite nuclear localization sequence
MSEVEFSHEYWMRHALTLAKRAWDEREVPVGAVLVHNNRVIGEGWNRPIGRHDPTAHAEIMALRQGGLVMQNYRLIDATLYVTLEPCVMCAGAMIHSRIGRVVFGARDAKTGAAGSLMDVLHHPGMNHRVEITEGILADECAALLSDFFRMRRQEIKAQKKAQSSTDGGSSGGSSGSETPGTSESATPESSGGSSGGSMSEVEFSHEYWMRHALTLAKRARDEREVPVGAVLVLNNRVIGEGWNRAIGLHDPTAHAEIMALRQGGLVMQNYRLIDATLYVTFEPCVMCAGAMIHSRIGRVVFGVRNAKTGAAGSLMDVLHYPGMNHRVEITEGILADECAALLCTFFRMPRQVFNAQKKAQSSTDSGGSSGGSSGSETPGTSESATPESSGGSSGGSEIGKATAKYFFYSNIMNFFKTEITLANGEIRKRPLIETNGETGEIVWDKGRDFATVRKVLSMPQVNIVKKTEVQTGGFSKESILPKRNSDKLIARKKDWDPKKYGGFMQPTVAYSVLVVAKVEKGKSKKLKSVKELLGITIMERSSFEKNPIDFLEAKGYKEVKKDLIIKLPKYSLFELENGRKRMLASAKFLQKGNELALPSKYVNFLYLASHYEKLKGSPEDNEQKQLFVEQHKHYLDEIIEQISEFSKRVILADANLDKVLSAYNKHRDKPIREQAENIIHLFTLTNLGAPRAFKYFDTTIARKEYRSTKEVLDATLIHQSITGLYETRIDLSQLGGDGGSGGSGGSGGSGGSGGSGGMDKKYSIGLAIGTNSVGWAVITDEYKVPSKKFKVLGNTDRHSIKKNLIGALLFDSGETAEATRLKRTARRRYTRRKNRICYLQEIFSNEMAKVDDSFFHRLEESFLVEEDKKHERHPIFGNIVDEVAYHEKYPTIYHLRKKLVDSTDKADLRLIYLALAHMIKFRGHFLIEGDLNPDNSDVDKLFIQLVQTYNQLFEENPINASGVDAKAILSARLSKSRRLENLIAQLPGEKKNGLFGNLIALSLGLTPNFKSNFDLAEDAKLQLSKDTYDDDLDNLLAQIGDQYADLFLAAKNLSDAILLSDILRVNTEITKAPLSASMIKRYDEHHQDLTLLKALVRQQLPEKYKEIFFDQSKNGYAGYIDGGASQEEFYKFIKPILEKMDGTEELLVKLNREDLLRKQRTFDNGSIPHQIHLGELHAILRRQEDFYPFLKDNREKIEKILTFRIPYYVGPLARGNSRFAWMTRKSEETITPWNFEEVVDKGASAQSFIERMTNFDKNLPNEKVLPKHSLLYEYFTVYNELTKVKYVTEGMRKPAFLSGEQKKAIVDLLFKTNRKVTVKQLKEDYFKKIECFDSVEISGVEDRFNASLGTYHDLLKIIKDKDFLDNEENEDILEDIVLTLTLFEDREMIEERLKTYAHLFDDKVMKQLKRRRYTGWGRLSRKLINGIRDKQSGKTILDFLKSDGFANRNFMQLIHDDSLTFKEDIQKAQVSGQGDSLHEHIANLAGSPAIKKGILQTVKVVDELVKVMGRHKPENIVIEMARENQTTQKGQKNSRERMKRIEEGIKELGSQILKEHPVENTQLQNEKLYLYYLQNGRDMYVDQELDINRLSDYDVDHIVPQSFLKDDSIDNKVLTRSDKNRGKSDNVPSEEVVKKMKNYWRQLLNAKLITQRKFDNLTKAERGGLSELDKAGFIKRQLVETRQITKHVAQILDSRMNTKYDENDKLIREVKVITLKSKLVSDFRKDFQFYKVREINNYHHAHDAYLNAVVGTALIKKYPKLESEFVYGDYKVYDVRKMIAKSEQEGADKRTADGSEFESPKKKRKV

SEQ ID NO: 258 - protein, 1588 aa, Artificial Sequence
  Description of artificial sequence: ABE8.8-m polypeptide sequence
  MISC_FEATURE (1)..(167): Adenosine deaminase sequence
  MISC_FEATURE (168)..(199): Linker sequence
  MISC_FEATURE (200)..(1566): Sequence derived from Cas9
  MISC_FEATURE (1567)..(1588): Bipartite nuclear localization sequence
MSEVEFSHEYWMRHALTLAKRARDEREVPVGAVLVLNNRVIGEGWNRAIGLHDPTAHAEIMALRQGGLVMQNYRLIDATLYVTFEPCVMCAGAMIHSRIGRVVFGVRNAKTGAAGSLMDVLHHPGMNHRVEITEGILADECAALLCRFFRMPRRVFNAQKKAQSSTDSGGSSGGSSGSETPGTSESATPESSGGSSGGSDKKYSIGLAIGTNSVGWAVITDEYKVPSKKFKVLGNTDRHSIKKNLIGALLFDSGETAEATRLKRTARRRYTRRKNRICYLQEIFSNEMAKVDDSFFHRLEESFLVEEDKKHERHPIFGNIVDEVAYHEKYPTIYHLRKKLVDSTDKADLRLIYLALAHMIKFRGHFLIEGDLNPDNSDVDKLFIQLVQTYNQLFEENPINASGVDAKAILSARLSKSRRLENLIAQLPGEKKNGLFGNLIALSLGLTPNFKSNFDLAEDAKLQLSKDTYDDDLDNLLAQIGDQYADLFLAAKNLSDAILLSDILRVNTEITKAPLSASMIKRYDEHHQDLTLLKALVRQQLPEKYKEIFFDQSKNGYAGYIDGGASQEEFYKFIKPILEKMDGTEELLVKLNREDLLRKQRTFDNGSIPHQIHLGELHAILRRQEDFYPFLKDNREKIEKILTFRIPYYVGPLARGNSRFAWMTRKSEETITPWNFEEVVDKGASAQSFIERMTNFDKNLPNEKVLPKHSLLYEYFTVYNELTKVKYVTEGMRKPAFLSGEQKKAIVDLLFKTNRKVTVKQLKEDYFKKIECFDSVEISGVEDRFNASLGTYHDLLKIIKDKDFLDNEENEDILEDIVLTLTLFEDREMIEERLKTYAHLFDDKVMKQLKRRRYTGWGRLSRKLINGIRDKQSGKTILDFLKSDGFANRNFMQLIHDDSLTFKEDIQKAQVSGQGDSLHEHIANLAGSPAIKKGILQTVKVVDELVKVMGRHKPENIVIEMARENQTTQKGQKNSRERMKRIEEGIKELGSQILKEHPVENTQLQNEKLYLYYLQNGRDMYVDQELDINRLSDYDVDHIVPQSFLKDDSIDNKVLTRSDKNRGKSDNVPSEEVVKKMKNYWRQLLNAKLITQRKFDNLTKAERGGLSELDKAGFIKRQLVETRQITKHVAQILDSRMNTKYDENDKLIREVKVITLKSKLVSDFRKDFQFYKVREINNYHHAHDAYLNAVVGTALIKKYPKLESEFVYGDYKVYDVRKMIAKSEQEIGKATAKYFFYSNIMNFFKTEITLANGEIRKRPLIETNGETGEIVWDKGRDFATVRKVLSMPQVNIVKKTEVQTGGFSKESILPKRNSDKLIARKKDWDPKKYGGFDSPTVAYSVLVVAKVEKGKSKKLKSVKELLGITIMERSSFEKNPIDFLEAKGYKEVKKDLIIKLPKYSLFELENGRKRMLASAGELQKGNELALPSKYVNFLYLASHYEKLKGSPEDNEQKQLFVEQHKHYLDEIIEQISEFSKRVILADANLDKVLSAYNKHRDKPIREQAENIIHLFTLTNLGAPAAFKYFDTTIDRKRYTSTKEVLDATLIHQSITGLYETRIDLSQLGGDEGADKRTADGSEFESPKKKRKV

SEQ ID NO: 259 - protein, 1786 aa, Artificial Sequence
  Description of artificial sequence: ABE8.8-d polypeptide sequence
  MISC_FEATURE (1)..(167): Adenosine deaminase sequence
  MISC_FEATURE (168)..(199): Linker sequence
  MISC_FEATURE (200)..(365): Adenosine deaminase sequence
  MISC_FEATURE (366)..(397): Linker sequence
  MISC_FEATURE (398)..(1764): Sequence derived from Cas9
  MISC_FEATURE (1765)..(1786): Bipartite nuclear localization sequence
MSEVEFSHEYWMRHALTLAKRAWDEREVPVGAVLVHNNRVIGEGWNRPIGRHDPTAHAEIMALRQGGLVMQNYRLIDATLYVTLEPCVMCAGAMIHSRIGRVVFGARDAKTGAAGSLMDVLHHPGMNHRVEITEGILADECAALLSDFFRMRRQEIKAQKKAQSSTDSGGSSGGSSGSETPGTSESATPESSGGSSGGSSEVEFSHEYWMRHALTLAKRARDEREVPVGAVLVLNNRVIGEGWNRAIGLHDPTAHAEIMALRQGGLVMQNYRLIDATLYVTFEPCVMCAGAMIHSRIGRVVFGVRNAKTGAAGSLMDVLHHPGMNHRVEITEGILADECAALLCRFFRMPRRVFNAQKKAQSSTDSGGSSGGSSGSETPGTSESATPESSGGSSGGSDKKYSIGLAIGTNSVGWAVITDEYKVPSKKFKVLGNTDRHSIKKNLIGALLFDSGETAEATRLKRTARRRYTRRKNRICYLQEIFSNEMAKVDDSFFHRLEESFLVEEDKKHERHPIFGNIVDEVAYHEKYPTIYHLRKKLVDSTDKADLRLIYLALAHMIKFRGHFLIEGDLNPDNSDVDKLFIQLVQTYNQLFEENPINASGVDAKAILSARLSKSRRLENLIAQLPGEKKNGLFGNLIALSLGLTPNFKSNFDLAEDAKLQLSKDTYDDDLDNLLAQIGDQYADLFLAAKNLSDAILLSDILRVNTEITKAPLSASMIKRYDEHHQDLTLLKALVRQQLPEKYKEIFFDQSKNGYAGYIDGGASQEEFYKFIKPILEKMDGTEELLVKLNREDLLRKQRTFDNGSIPHQIHLGELHAILRRQEDFYPFLKDNREKIEKILTFRIPYYVGPLARGNSRFAWMTRKSEETITPWNFEEVVDKGASAQSFIERMTNFDKNLPNEKVLPKHSLLYEYFTVYNELTKVKYVTEGMRKPAFLSGEQKKAIVDLLFKTNRKVTVKQLKEDYFKKIECFDSVEISGVEDRFNASLGTYHDLLKIIKDKDFLDNEENEDILEDIVLTLTLFEDREMIEERLKTYAHLFDDKVMKQLKRRRYTGWGRLSRKLINGIRDKQSGKTILDFLKSDGFANRNFMQLIHDDSLTFKEDIQKAQVSGQGDSLHEHIANLAGSPAIKKGILQTVKVVDELVKVMGRHKPENIVIEMARENQTTQKGQKNSRERMKRIEEGIKELGSQILKEHPVENTQLQNEKLYLYYLQNGRDMYVDQELDINRLSDYDVDHIVPQSFLKDDSIDNKVLTRSDKNRGKSDNVPSEEVVKKMKNYWRQLLNAKLITQRKFDNLTKAERGGLSELDKAGFIKRQLVETRQITKHVAQILDSRMNTKYDENDKLIREVKVITLKSKLVSDFRKDFQFYKVREINNYHHAHDAYLNAVVGTALIKKYPKLESEFVYGDYKVYDVRKMIAKSEQEIGKATAKYFFYSNIMNFFKTEITLANGEIRKRPLIETNGETGEIVWDKGRDFATVRKVLSMPQVNIVKKTEVQTGGFSKESILPKRNSDKLIARKKDWDPKKYGGFDSPTVAYSVLVVAKVEKGKSKKLKSVKELLGITIMERSSFEKNPIDFLEAKGYKEVKKDLIIKLPKYSLFELENGRKRMLASAGELQKGNELALPSKYVNFLYLASHYEKLKGSPEDNEQKQLFVEQHKHYLDEIIEQISEFSKRVILADANLDKVLSAYNKHRDKPIREQAENIIHLFTLTNLGAPAAFKYFDTTIDRKRYTSTKEVLDATLIHQSITGLYETRIDLSQLGGDEGADKRTADGSEFESPKKKRKV

SEQ ID NO: 260 - protein, 1588 aa, Artificial Sequence
  Description of artificial sequence: ABE8.13-m polypeptide sequence
  MISC_FEATURE (1)..(167): Adenosine deaminase sequence
  MISC_FEATURE (168)..(199): Linker sequence
  MISC_FEATURE (200)..(1566): Sequence derived from Cas9
  MISC_FEATURE (1567)..(1588): Bipartite nuclear localization sequence
MSEVEFSHEYWMRHALTLAKRARDEREVPVGAVLVLNNRVIGEGWNRAIGLHDPTAHAEIMALRQGGLVMQNYRLYDATLYVTFEPCVMCAGAMIHSRIGRVVFGVRNAKTGAAGSLMDVLHHPGMNHRVEITEGILADECAALLCRFFRMPRRVFNAQKKAQSSTDSGGSSGGSSGSETPGTSESATPESSGGSSGGSDKKYSIGLAIGTNSVGWAVITDEYKVPSKKFKVLGNTDRHSIKKNLIGALLFDSGETAEATRLKRTARRRYTRRKNRICYLQEIFSNEMAKVDDSFFHRLEESFLVEEDKKHERHPIFGNIVDEVAYHEKYPTIYHLRKKLVDSTDKADLRLIYLALAHMIKFRGHFLIEGDLNPDNSDVDKLFIQLVQTYNQLFEENPINASGVDAKAILSARLSKSRRLENLIAQLPGEKKNGLFGNLIALSLGLTPNFKSNFDLAEDAKLQLSKDTYDDDLDNLLAQIGDQYADLFLAAKNLSDAILLSDILRVNTEITKAPLSASMIKRYDEHHQDLTLLKALVRQQLPEKYKEIFFDQSKNGYAGYIDGGASQEEFYKFIKPILEKMDGTEELLVKLNREDLLRKQRTFDNGSIPHQIHLGELHAILRRQEDFYPFLKDNREKIEKILTFRIPYYVGPLARGNSRFAWMTRKSEETITPWNFEEVVDKGASAQSFIERMTNFDKNLPNEKVLPKHSLLYEYFTVYNELTKVKYVTEGMRKPAFLSGEQKKAIVDLLFKTNRKVTVKQLKEDYFKKIECFDSVEISGVEDRFNASLGTYHDLLKIIKDKDFLDNEENEDILEDIVLTLTLFEDREMIEERLKTYAHLFDDKVMKQLKRRRYTGWGRLSRKLINGIRDKQSGKTILDFLKSDGFANRNFMQLIHDDSLTFKEDIQKAQVSGQGDSLHEHIANLAGSPAIKKGILQTVKVVDELVKVMGRHKPENIVIEMARENQTTQKGQKNSRERMKRIEEGIKELGSQILKEHPVENTQLQNEKLYLYYLQNGRDMYVDQELDINRLSDYDVDHIVPQSFLKDDSIDNKVLTRSDKNRGKSDNVPSEEVVKKMKNYWRQLLNAKLITQRKFDNLTKAERGGLSELDKAGFIKRQLVETRQITKHVAQILDSRMNTKYDENDKLIREVKVITLKSKLVSDFRKDFQFYKVREINNYHHAHDAYLNAVVGTALIKKYPKLESEFVYGDYKVYDVRKMIAKSEQEIGKATAKYFFYSNIMNFFKTEITLANGEIRKRPLIETNGETGEIVWDKGRDFATVRKVLSMPQVNIVKKTEVQTGGFSKESILPKRNSDKLIARKKDWDPKKYGGFDSPTVAYSVLVVAKVEKGKSKKLKSVKELLGITIMERSSFEKNPIDFLEAKGYKEVKKDLIIKLPKYSLFELENGRKRMLASAGELQKGNELALPSKYVNFLYLASHYEKLKGSPEDNEQKQLFVEQHKHYLDEIIEQISEFSKRVILADANLDKVLSAYNKHRDKPIREQAENIIHLFTLTNLGAPAAFKYFDTTIDRKRYTSTKEVLDATLIHQSITGLYETRIDLSQLGGDEGADKRTADGSEFESPKKKRKV

SEQ ID NO: 261 - protein, 1786 aa, Artificial Sequence
  Description of artificial sequence: ABE8.13-d polypeptide sequence
  MISC_FEATURE (1)..(167): Adenosine deaminase sequence
  MISC_FEATURE (168)..(199): Linker sequence
  MISC_FEATURE (200)..(365): Adenosine deaminase sequence
  MISC_FEATURE (366)..(397): Linker sequence
  MISC_FEATURE (398)..(1764): Sequence derived from Cas9
  MISC_FEATURE (1765)..(1786): Bipartite nuclear localization sequence
MSEVEFSHEYWMRHALTLAKRAWDEREVPVGAVLVHNNRVIGEGWNRPIGRHDPTAHAEIMALRQGGLVMQNYRLIDATLYVTLEPCVMCAGAMIHSRIGRVVFGARDAKTGAAGSLMDVLHHPGMNHRVEITEGILADECAALLSDFFRMRRQEIKAQKKAQSSTDSGGSSGGSSGSETPGTSESATPESSGGSSGGSSEVEFSHEYWMRHALTLAKRARDEREVPVGAVLVLNNRVIGEGWNRAIGLHDPTAHAEIMALRQGGLVMQNYRLYDATLYVTFEPCVMCAGAMIHSRIGRVVFGVRNAKTGAAGSLMDVLHHPGMNHRVEITEGILADECAALLCRFFRMPRRVFNAQKKAQSSTDSGGSSGGSSGSETPGTSESATPESSGGSSGGSDKKYSIGLAIGTNSVGWAVITDEYKVPSKKFKVLGNTDRHSIKKNLIGALLFDSGETAEATRLKRTARRRYTRRKNRICYLQEIFSNEMAKVDDSFFHRLEESFLVEEDKKHERHPIFGNIVDEVAYHEKYPTIYHLRKKLVDSTDKADLRLIYLALAHMIKFRGHFLIEGDLNPDNSDVDKLFIQLVQTYNQLFEENPINASGVDAKAILSARLSKSRRLENLIAQLPGEKKNGLFGNLIALSLGLTPNFKSNFDLAEDAKLQLSKDTYDDDLDNLLAQIGDQYADLFLAAKNLSDAILLSDILRVNTEITKAPLSASMIKRYDEHHQDLTLLKALVRQQLPEKYKEIFFDQSKNGYAGYIDGGASQEEFYKFIKPILEKMDGTEELLVKLNREDLLRKQRTFDNGSIPHQIHLGELHAILRRQEDFYPFLKDNREKIEKILTFRIPYYVGPLARGNSRFAWMTRKSEETITPWNFEEVVDKGASAQSFIERMTNFDKNLPNEKVLPKHSLLYEYFTVYNELTKVKYVTEGMRKPAFLSGEQKKAIVDLLFKTNRKVTVKQLKEDYFKKIECFDSVEISGVEDRFNASLGTYHDLLKIIKDKDFLDNEENEDILEDIVLTLTLFEDREMIEERLKTYAHLFDDKVMKQLKRRRYTGWGRLSRKLINGIRDKQSGKTILDFLKSDGFANRNFMQLIHDDSLTFKEDIQKAQVSGQGDSLHEHIANLAGSPAIKKGILQTVKVVDELVKVMGRHKPENIVIEMARENQTTQKGQKNSRERMKRIEEGIKELGSQILKEHPVENTQLQNEKLYLYYLQNGRDMYVDQELDINRLSDYDVDHIVPQSFLKDDSIDNKVLTRSDKNRGKSDNVPSEEVVKKMKNYWRQLLNAKLITQRKFDNLTKAERGGLSELDKAGFIKRQLVETRQITKHVAQILDSRMNTKYDENDKLIREVKVITLKSKLVSDFRKDFQFYKVREINNYHHAHDAYLNAVVGTALIKKYPKLESEFVYGDYKVYDVRKMIAKSEQEIGKATAKYFFYSNIMNFFKTEITLANGEIRKRPLIETNGETGEIVWDKGRDFATVRKVLSMPQVNIVKKTEVQTGGFSKESILPKRNSDKLIARKKDWDPKKYGGFDSPTVAYSVLVVAKVEKGKSKKLKSVKELLGITIMERSSFEKNPIDFLEAKGYKEVKKDLIIKLPKYSLFELENGRKRMLASAGELQKGNELALPSKYVNFLYLASHYEKLKGSPEDNEQKQLFVEQHKHYLDEIIEQISEFSKRVILADANLDKVLSAYNKHRDKPIREQAENIIHLFTLTNLGAPAAFKYFDTTIDRKRYTSTKEVLDATLIHQSITGLYETRIDLSQLGGDEGADKRTADGSEFESPKKKRKV

SEQ ID NO: 262 - protein, 1588 aa, Artificial Sequence
  Description of artificial sequence: ABE8.17-m polypeptide sequence
  MISC_FEATURE (1)..(167): Adenosine deaminase sequence
  MISC_FEATURE (168)..(199): Linker sequence
  MISC_FEATURE (200)..(1566): Sequence derived from Cas9
  MISC_FEATURE (1567)..(1588): Bipartite nuclear localization sequence
MSEVEFSHEYWMRHALTLAKRARDEREVPVGAVLVLNNRVIGEGWNRAIGLHDPTAHAEIMALRQGGLVMQNYRLIDATLYSTFEPCVMCAGAMIHSRIGRVVFGVRNAKTGAAGSLMDVLHYPGMNHRVEITEGILADECAALLCYFFRMPRRVFNAQKKAQSSTDSGGSSGGSSGSETPGTSESATPESSGGSSGGSDKKYSIGLAIGTNSVGWAVITDEYKVPSKKFKVLGNTDRHSIKKNLIGALLFDSGETAEATRLKRTARRRYTRRKNRICYLQEIFSNEMAKVDDSFFHRLEESFLVEEDKKHERHPIFGNIVDEVAYHEKYPTIYHLRKKLVDSTDKADLRLIYLALAHMIKFRGHFLIEGDLNPDNSDVDKLFIQLVQTYNQLFEENPINASGVDAKAILSARLSKSRRLENLIAQLPGEKKNGLFGNLIALSLGLTPNFKSNFDLAEDAKLQLSKDTYDDDLDNLLAQIGDQYADLFLAAKNLSDAILLSDILRVNTEITKAPLSASMIKRYDEHHQDLTLLKALVRQQLPEKYKEIFFDQSKNGYAGYIDGGASQEEFYKFIKPILEKMDGTEELLVKLNREDLLRKQRTFDNGSIPHQIHLGELHAILRRQEDFYPFLKDNREKIEKILTFRIPYYVGPLARGNSRFAWMTRKSEETITPWNFEEVVDKGASAQSFIERMTNFDKNLPNEKVLPKHSLLYEYFTVYNELTKVKYVTEGMRKPAFLSGEQKKAIVDLLFKTNRKVTVKQLKEDYFKKIECFDSVEISGVEDRFNASLGTYHDLLKIIKDKDFLDNEENEDILEDIVLTLTLFEDREMIEERLKTYAHLFDDKVMKQLKRRRYTGWGRLSRKLINGIRDKQSGKTILDFLKSDGFANRNFMQLIHDDSLTFKEDIQKAQVSGQGDSLHEHIANLAGSPAIKKGILQTVKVVDELVKVMGRHKPENIVIEMARENQTTQKGQKNSRERMKRIEEGIKELGSQILKEHPVENTQLQNEKLYLYYLQNGRDMYVDQELDINRLSDYDVDHIVPQSFLKDDSIDNKVLTRSDKNRGKSDNVPSEEVVKKMKNYWRQLLNAKLITQRKFDNLTKAERGGLSELDKAGFIKRQLVETRQITKHVAQILDSRMNTKYDENDKLIREVKVITLKSKLVSDFRKDFQFYKVREINNYHHAHDAYLNAVVGTALIKKYPKLESEFVYGDYKVYDVRKMIAKSEQEIGKATAKYFFYSNIMNFFKTEITLANGEIRKRPLIETNGETGEIVWDKGRDFATVRKVLSMPQVNIVKKTEVQTGGFSKESILPKRNSDKLIARKKDWDPKKYGGFDSPTVAYSVLVVAKVEKGKSKKLKSVKELLGITIMERSSFEKNPIDFLEAKGYKEVKKDLIIKLPKYSLFELENGRKRMLASAGELQKGNELALPSKYVNFLYLASHYEKLKGSPEDNEQKQLFVEQHKHYLDEIIEQISEFSKRVILADANLDKVLSAYNKHRDKPIREQAENIIHLFTLTNLGAPAAFKYFDTTIDRKRYTSTKEVLDATLIHQSITGLYETRIDLSQLGGDEGADKRTADGSEFESPKKKRKV

SEQ ID NO: 263 - protein, 1786 aa, Artificial Sequence
  Description of artificial sequence: ABE8.17-d polypeptide sequence
  MISC_FEATURE (1)..(167): Adenosine deaminase sequence
  MISC_FEATURE (168)..(199): Linker sequence
  MISC_FEATURE (200)..(365): Adenosine deaminase sequence
  MISC_FEATURE (366)..(397): Linker sequence
  MISC_FEATURE (398)..(1764): Sequence derived from Cas9
  MISC_FEATURE (1765)..(1786): Bipartite nuclear localization sequence
MSEVEFSHEYWMRHALTLAKRAWDEREVPVGAVLVHNNRVIGEGWNRPIGRHDPTAHAEIMALRQGGLVMQNYRLIDATLYVTLEPCVMCAGAMIHSRIGRVVFGARDAKTGAAGSLMDVLHHPGMNHRVEITEGILADECAALLSDFFRMRRQEIKAQKKAQSSTDSGGSSGGSSGSETPGTSESATPESSGGSSGGSSEVEFSHEYWMRHALTLAKRARDEREVPVGAVLVLNNRVIGEGWNRAIGLHDPTAHAEIMALRQGGLVMQNYRLIDATLYSTFEPCVMCAGAMIHSRIGRVVFGVRNAKTGAAGSLMDVLHYPGMNHRVEITEGILADECAALLCYFFRMPRRVFNAQKKAQSSTDSGGSSGGSSGSETPGTSESATPESSGGSSGGSDKKYSIGLAIGTNSVGWAVITDEYKVPSKKFKVLGNTDRHSIKKNLIGALLFDSGETAEATRLKRTARRRYTRRKNRICYLQEIFSNEMAKVDDSFFHRLEESFLVEEDKKHERHPIFGNIVDEVAYHEKYPTIYHLRKKLVDSTDKADLRLIYLALAHMIKFRGHFLIEGDLNPDNSDVDKLFIQLVQTYNQLFEENPINASGVDAKAILSARLSKSRRLENLIAQLPGEKKNGLFGNLIALSLGLTPNFKSNFDLAEDAKLQLSKDTYDDDLDNLLAQIGDQYADLFLAAKNLSDAILLSDILRVNTEITKAPLSASMIKRYDEHHQDLTLLKALVRQQLPEKYKEIFFDQSKNGYAGYIDGGASQEEFYKFIKPILEKMDGTEELLVKLNREDLLRKQRTFDNGSIPHQIHLGELHAILRRQEDFYPFLKDNREKIEKILTFRIPYYVGPLARGNSRFAWMTRKSEETITPWNFEEVVDKGASAQSFIERMTNFDKNLPNEKVLPKHSLLYEYFTVYNELTKVKYVTEGMRKPAFLSGEQKKAIVDLLFKTNRKVTVKQLKEDYFKKIECFDSVEISGVEDRFNASLGTYHDLLKIIKDKDFLDNEENEDILEDIVLTLTLFEDREMIEERLKTYAHLFDDKVMKQLKRRRYTGWGRLSRKLINGIRDKQSGKTILDFLKSDGFANRNFMQLIHDDSLTFKEDIQKAQVSGQGDSLHEHIANLAGSPAIKKGILQTVKVVDELVKVMGRHKPENIVIEMARENQTTQKGQKNSRERMKRIEEGIKELGSQILKEHPVENTQLQNEKLYLYYLQNGRDMYVDQELDINRLSDYDVDHIVPQSFLKDDSIDNKVLTRSDKNRGKSDNVPSEEVVKKMKNYWRQLLNAKLITQRKFDNLTKAERGGLSELDKAGFIKRQLVETRQITKHVAQILDSRMNTKYDENDKLIREVKVITLKSKLVSDFRKDFQFYKVREINNYHHAHDAYLNAVVGTALIKKYPKLESEFVYGDYKVYDVRKMIAKSEQEIGKATAKYFFYSNIMNFFKTEITLANGEIRKRPLIETNGETGEIVWDKGRDFATVRKVLSMPQVNIVKKTEVQTGGFSKESILPKRNSDKLIARKKDWDPKKYGGFDSPTVAYSVLVVAKVEKGKSKKLKSVKELLGITIMERSSFEKNPIDFLEAKGYKEVKKDLIIKLPKYSLFELENGRKRMLASAGELQKGNELALPSKYVNFLYLASHYEKLKGSPEDNEQKQLFVEQHKHYLDEIIEQISEFSKRVILADANLDKVLSAYNKHRDKPIREQAENIIHLFTLTNLGAPAAFKYFDTTIDRKRYTSTKEVLDATLIHQSITGLYETRIDLSQLGGDEGADKRTADGSEFESPKKKRKV

SEQ ID NO: 264 - protein, 1588 aa, Artificial Sequence
  Description of artificial sequence: ABE8.20-m polypeptide sequence
  MISC_FEATURE (1)..(167): Adenosine deaminse sequence
  MISC_FEATURE (168)..(199): Linker sequence
  MISC_FEATURE (200)..(1566): Sequence derived from Cas9
  MISC_FEATURE (1567)..(1588): Bipartite nuclear localization sequence
MSEVEFSHEYWMRHALTLAKRARDEREVPVGAVLVLNNRVIGEGWNRAIGLHDPTAHAEIMALRQGGLVMQNYRLYDATLYSTFEPCVMCAGAMIHSRIGRVVFGVRNAKTGAAGSLMDVLHHPGMNHRVEITEGILADECAALLCRFFRMPRRVFNAQKKAQSSTDSGGSSGGSSGSETPGTSESATPESSGGSSGGSDKKYSIGLAIGTNSVGWAVITDEYKVPSKKFKVLGNTDRHSIKKNLIGALLFDSGETAEATRLKRTARRRYTRRKNRICYLQEIFSNEMAKVDDSFFHRLEESFLVEEDKKHERHPIFGNIVDEVAYHEKYPTIYHLRKKLVDSTDKADLRLIYLALAHMIKFRGHFLIEGDLNPDNSDVDKLFIQLVQTYNQLFEENPINASGVDAKAILSARLSKSRRLENLIAQLPGEKKNGLFGNLIALSLGLTPNFKSNFDLAEDAKLQLSKDTYDDDLDNLLAQIGDQYADLFLAAKNLSDAILLSDILRVNTEITKAPLSASMIKRYDEHHQDLTLLKALVRQQLPEKYKEIFFDQSKNGYAGYIDGGASQEEFYKFIKPILEKMDGTEELLVKLNREDLLRKQRTFDNGSIPHQIHLGELHAILRRQEDFYPFLKDNREKIEKILTFRIPYYVGPLARGNSRFAWMTRKSEETITPWNFEEVVDKGASAQSFIERMTNFDKNLPNEKVLPKHSLLYEYFTVYNELTKVKYVTEGMRKPAFLSGEQKKAIVDLLFKTNRKVTVKQLKEDYFKKIECFDSVEISGVEDRFNASLGTYHDLLKIIKDKDFLDNEENEDILEDIVLTLTLFEDREMIEERLKTYAHLFDDKVMKQLKRRRYTGWGRLSRKLINGIRDKQSGKTILDFLKSDGFANRNFMQLIHDDSLTFKEDIQKAQVSGQGDSLHEHIANLAGSPAIKKGILQTVKVVDELVKVMGRHKPENIVIEMARENQTTQKGQKNSRERMKRIEEGIKELGSQILKEHPVENTQLQNEKLYLYYLQNGRDMYVDQELDINRLSDYDVDHIVPQSFLKDDSIDNKVLTRSDKNRGKSDNVPSEEVVKKMKNYWRQLLNAKLITQRKFDNLTKAERGGLSELDKAGFIKRQLVETRQITKHVAQILDSRMNTKYDENDKLIREVKVITLKSKLVSDFRKDFQFYKVREINNYHHAHDAYLNAVVGTALIKKYPKLESEFVYGDYKVYDVRKMIAKSEQEIGKATAKYFFYSNIMNFFKTEITLANGEIRKRPLIETNGETGEIVWDKGRDFATVRKVLSMPQVNIVKKTEVQTGGFSKESILPKRNSDKLIARKKDWDPKKYGGFDSPTVAYSVLVVAKVEKGKSKKLKSVKELLGITIMERSSFEKNPIDFLEAKGYKEVKKDLIIKLPKYSLFELENGRKRMLASAGELQKGNELALPSKYVNFLYLASHYEKLKGSPEDNEQKQLFVEQHKHYLDEIIEQISEFSKRVILADANLDKVLSAYNKHRDKPIREQAENIIHLFTLTNLGAPAAFKYFDTTIDRKRYTSTKEVLDATLIHQSITGLYETRIDLSQLGGDEGADKRTADGSEFESPKKKRKV

SEQ ID NO: 265 - protein, 1786 aa, Artificial Sequence
  Description of artificial sequence: ABE8.20-d polypeptide sequence
  MISC_FEATURE (1)..(167): Adenosine deaminase sequence
  MISC_FEATURE (168)..(199): Linker sequence
  MISC_FEATURE (200)..(365): Adenosine deaminase sequence
  MISC_FEATURE (366)..(397): Linker sequence
  MISC_FEATURE (398)..(1764): Sequence derived from Cas9
  MISC_FEATURE (1765)..(1786): Bipartite nuclear localization sequence
MSEVEFSHEYWMRHALTLAKRAWDEREVPVGAVLVHNNRVIGEGWNRPIGRHDPTAHAEIMALRQGGLVMQNYRLIDATLYVTLEPCVMCAGAMIHSRIGRVVFGARDAKTGAAGSLMDVLHHPGMNHRVEITEGILADECAALLSDFFRMRRQEIKAQKKAQSSTDSGGSSGGSSGSETPGTSESATPESSGGSSGGSSEVEFSHEYWMRHALTLAKRARDEREVPVGAVLVLNNRVIGEGWNRAIGLHDPTAHAEIMALRQGGLVMQNYRLYDATLYSTFEPCVMCAGAMIHSRIGRVVFGVRNAKTGAAGSLMDVLHHPGMNHRVEITEGILADECAALLCRFFRMPRRVFNAQKKAQSSTDSGGSSGGSSGSETPGTSESATPESSGGSSGGSDKKYSIGLAIGTNSVGWAVITDEYKVPSKKFKVLGNTDRHSIKKNLIGALLFDSGETAEATRLKRTARRRYTRRKNRICYLQEIFSNEMAKVDDSFFHRLEESFLVEEDKKHERHPIFGNIVDEVAYHEKYPTIYHLRKKLVDSTDKADLRLIYLALAHMIKFRGHFLIEGDLNPDNSDVDKLFIQLVQTYNQLFEENPINASGVDAKAILSARLSKSRRLENLIAQLPGEKKNGLFGNLIALSLGLTPNFKSNFDLAEDAKLQLSKDTYDDDLDNLLAQIGDQYADLFLAAKNLSDAILLSDILRVNTEITKAPLSASMIKRYDEHHQDLTLLKALVRQQLPEKYKEIFFDQSKNGYAGYIDGGASQEEFYKFIKPILEKMDGTEELLVKLNREDLLRKQRTFDNGSIPHQIHLGELHAILRRQEDFYPFLKDNREKIEKILTFRIPYYVGPLARGNSRFAWMTRKSEETITPWNFEEVVDKGASAQSFIERMTNFDKNLPNEKVLPKHSLLYEYFTVYNELTKVKYVTEGMRKPAFLSGEQKKAIVDLLFKTNRKVTVKQLKEDYFKKIECFDSVEISGVEDRFNASLGTYHDLLKIIKDKDFLDNEENEDILEDIVLTLTLFEDREMIEERLKTYAHLFDDKVMKQLKRRRYTGWGRLSRKLINGIRDKQSGKTILDFLKSDGFANRNFMQLIHDDSLTFKEDIQKAQVSGQGDSLHEHIANLAGSPAIKKGILQTVKVVDELVKVMGRHKPENIVIEMARENQTTQKGQKNSRERMKRIEEGIKELGSQILKEHPVENTQLQNEKLYLYYLQNGRDMYVDQELDINRLSDYDVDHIVPQSFLKDDSIDNKVLTRSDKNRGKSDNVPSEEVVKKMKNYWRQLLNAKLITQRKFDNLTKAERGGLSELDKAGFIKRQLVETRQITKHVAQILDSRMNTKYDENDKLIREVKVITLKSKLVSDFRKDFQFYKVREINNYHHAHDAYLNAVVGTALIKKYPKLESEFVYGDYKVYDVRKMIAKSEQEIGKATAKYFFYSNIMNFFKTEITLANGEIRKRPLIETNGETGEIVWDKGRDFATVRKVLSMPQVNIVKKTEVQTGGFSKESILPKRNSDKLIARKKDWDPKKYGGFDSPTVAYSVLVVAKVEKGKSKKLKSVKELLGITIMERSSFEKNPIDFLEAKGYKEVKKDLIIKLPKYSLFELENGRKRMLASAGELQKGNELALPSKYVNFLYLASHYEKLKGSPEDNEQKQLFVEQHKHYLDEIIEQISEFSKRVILADANLDKVLSAYNKHRDKPIREQAENIIHLFTLTNLGAPAAFKYFDTTIDRKRYTSTKEVLDATLIHQSITGLYETRIDLSQLGGDEGADKRTADGSEFESPKKKRKV

SEQ ID NO: 266 - protein, 1588 aa, Artificial Sequence
  Description of artificial sequence: 01. monoABE8.1_bpNLS + Y147T polypeptide sequence
MSEVEFSHEYWMRHALTLAKRARDEREVPVGAVLVLNNRVIGEGWNRAIGLHDPTAHAEIMALRQGGLVMQNYRLIDATLYVTFEPCVMCAGAMIHSRIGRVVFGVRNAKTGAAGSLMDVLHYPGMNHRVEITEGILADECAALLCTFFRMPRQVFNAQKKAQSSTDSGGSSGGSSGSETPGTSESATPESSGGSSGGSDKKYSIGLAIGTNSVGWAVITDEYKVPSKKFKVLGNTDRHSIKKNLIGALLFDSGETAEATRLKRTARRRYTRRKNRICYLQEIFSNEMAKVDDSFFHRLEESFLVEEDKKHERHPIFGNIVDEVAYHEKYPTIYHLRKKLVDSTDKADLRLIYLALAHMIKFRGHFLIEGDLNPDNSDVDKLFIQLVQTYNQLFEENPINASGVDAKAILSARLSKSRRLENLIAQLPGEKKNGLFGNLIALSLGLTPNFKSNFDLAEDAKLQLSKDTYDDDLDNLLAQIGDQYADLFLAAKNLSDAILLSDILRVNTEITKAPLSASMIKRYDEHHQDLTLLKALVRQQLPEKYKEIFFDQSKNGYAGYIDGGASQEEFYKFIKPILEKMDGTEELLVKLNREDLLRKQRTFDNGSIPHQIHLGELHAILRRQEDFYPFLKDNREKIEKILTFRIPYYVGPLARGNSRFAWMTRKSEETITPWNFEEVVDKGASAQSFIERMTNFDKNLPNEKVLPKHSLLYEYFTVYNELTKVKYVTEGMRKPAFLSGEQKKAIVDLLFKTNRKVTVKQLKEDYFKKIECFDSVEISGVEDRFNASLGTYHDLLKIIKDKDFLDNEENEDILEDIVLTLTLFEDREMIEERLKTYAHLFDDKVMKQLKRRRYTGWGRLSRKLINGIRDKQSGKTILDFLKSDGFANRNFMQLIHDDSLTFKEDIQKAQVSGQGDSLHEHIANLAGSPAIKKGILQTVKVVDELVKVMGRHKPENIVIEMARENQTTQKGQKNSRERMKRIEEGIKELGSQILKEHPVENTQLQNEKLYLYYLQNGRDMYVDQELDINRLSDYDVDHIVPQSFLKDDSIDNKVLTRSDKNRGKSDNVPSEEVVKKMKNYWRQLLNAKLITQRKFDNLTKAERGGLSELDKAGFIKRQLVETRQITKHVAQILDSRMNTKYDENDKLIREVKVITLKSKLVSDFRKDFQFYKVREINNYHHAHDAYLNAVVGTALIKKYPKLESEFVYGDYKVYDVRKMIAKSEQEIGKATAKYFFYSNIMNFFKTEITLANGEIRKRPLIETNGETGEIVWDKGRDFATVRKVLSMPQVNIVKKTEVQTGGFSKESILPKRNSDKLIARKKDWDPKKYGGFVSPTVAYSVLVVAKVEKGKSKKLKSVKELLGITIMERSSFEKNPIDFLEAKGYKEVKKDLIIKLPKYSLFELENGRKRMLASARELQKGNELALPSKYVNFLYLASHYEKLKGSPEDNEQKQLFVEQHKHYLDEIIEQISEFSKRVILADANLDKVLSAYNKHRDKPIREQAENIIHLFTLTNLGAPAAFKYFDTTIDRKQYRSTKEVLDATLIHQSITGLYETRIDLSQLGGDEGADKRTADGSEFESPKKKRKV

SEQ ID NO: 267 - protein, 1588 aa, Artificial Sequence
  Description of artificial sequence: 02. monoABE8.1_bpNLS + Y147R polypeptide sequence
MSEVEFSHEYWMRHALTLAKRARDEREVPVGAVLVLNNRVIGEGWNRAIGLHDPTAHAEIMALRQGGLVMQNYRLIDATLYVTFEPCVMCAGAMIHSRIGRVVFGVRNAKTGAAGSLMDVLHYPGMNHRVEITEGILADECAALLCRFFRMPRQVFNAQKKAQSSTDSGGSSGGSSGSETPGTSESATPESSGGSSGGSDKKYSIGLAIGTNSVGWAVITDEYKVPSKKFKVLGNTDRHSIKKNLIGALLFDSGETAEATRLKRTARRRYTRRKNRICYLQEIFSNEMAKVDDSFFHRLEESFLVEEDKKHERHPIFGNIVDEVAYHEKYPTIYHLRKKLVDSTDKADLRLIYLALAHMIKFRGHFLIEGDLNPDNSDVDKLFIQLVQTYNQLFEENPINASGVDAKAILSARLSKSRRLENLIAQLPGEKKNGLFGNLIALSLGLTPNFKSNFDLAEDAKLQLSKDTYDDDLDNLLAQIGDQYADLFLAAKNLSDAILLSDILRVNTEITKAPLSASMIKRYDEHHQDLTLLKALVRQQLPEKYKEIFFDQSKNGYAGYIDGGASQEEFYKFIKPILEKMDGTEELLVKLNREDLLRKQRTFDNGSIPHQIHLGELHAILRRQEDFYPFLKDNREKIEKILTFRIPYYVGPLARGNSRFAWMTRKSEETITPWNFEEVVDKGASAQSFIERMTNFDKNLPNEKVLPKHSLLYEYFTVYNELTKVKYVTEGMRKPAFLSGEQKKAIVDLLFKTNRKVTVKQLKEDYFKKIECFDSVEISGVEDRFNASLGTYHDLLKIIKDKDFLDNEENEDILEDIVLTLTLFEDREMIEERLKTYAHLFDDKVMKQLKRRRYTGWGRLSRKLINGIRDKQSGKTILDFLKSDGFANRNFMQLIHDDSLTFKEDIQKAQVSGQGDSLHEHIANLAGSPAIKKGILQTVKVVDELVKVMGRHKPENIVIEMARENQTTQKGQKNSRERMKRIEEGIKELGSQILKEHPVENTQLQNEKLYLYYLQNGRDMYVDQELDINRLSDYDVDHIVPQSFLKDDSIDNKVLTRSDKNRGKSDNVPSEEVVKKMKNYWRQLLNAKLITQRKFDNLTKAERGGLSELDKAGFIKRQLVETRQITKHVAQILDSRMNTKYDENDKLIREVKVITLKSKLVSDFRKDFQFYKVREINNYHHAHDAYLNAVVGTALIKKYPKLESEFVYGDYKVYDVRKMIAKSEQEIGKATAKYFFYSNIMNFFKTEITLANGEIRKRPLIETNGETGEIVWDKGRDFATVRKVLSMPQVNIVKKTEVQTGGFSKESILPKRNSDKLIARKKDWDPKKYGGFVSPTVAYSVLVVAKVEKGKSKKLKSVKELLGITIMERSSFEKNPIDFLEAKGYKEVKKDLIIKLPKYSLFELENGRKRMLASARELQKGNELALPSKYVNFLYLASHYEKLKGSPEDNEQKQLFVEQHKHYLDEIIEQISEFSKRVILADANLDKVLSAYNKHRDKPIREQAENIIHLFTLTNLGAPAAFKYFDTTIDRKQYRSTKEVLDATLIHQSITGLYETRIDLSQLGGDEGADKRTADGSEFESPKKKRKV

SEQ ID NO: 268 - protein, 1588 aa, Artificial Sequence
  Description of artificial sequence: 03. monoABE8.1_bpNLS + Q154S polypeptide sequence
MSEVEFSHEYWMRHALTLAKRARDEREVPVGAVLVLNNRVIGEGWNRAIGLHDPTAHAEIMALRQGGLVMQNYRLIDATLYVTFEPCVMCAGAMIHSRIGRVVFGVRNAKTGAAGSLMDVLHYPGMNHRVEITEGILADECAALLCYFFRMPRSVFNAQKKAQSSTDSGGSSGGSSGSETPGTSESATPESSGGSSGGSDKKYSIGLAIGTNSVGWAVITDEYKVPSKKFKVLGNTDRHSIKKNLIGALLFDSGETAEATRLKRTARRRYTRRKNRICYLQEIFSNEMAKVDDSFFHRLEESFLVEEDKKHERHPIFGNIVDEVAYHEKYPTIYHLRKKLVDSTDKADLRLIYLALAHMIKFRGHFLIEGDLNPDNSDVDKLFIQLVQTYNQLFEENPINASGVDAKAILSARLSKSRRLENLIAQLPGEKKNGLFGNLIALSLGLTPNFKSNFDLAEDAKLQLSKDTYDDDLDNLLAQIGDQYADLFLAAKNLSDAILLSDILRVNTEITKAPLSASMIKRYDEHHQDLTLLKALVRQQLPEKYKEIFFDQSKNGYAGYIDGGASQEEFYKFIKPILEKMDGTEELLVKLNREDLLRKQRTFDNGSIPHQIHLGELHAILRRQEDFYPFLKDNREKIEKILTFRIPYYVGPLARGNSRFAWMTRKSEETITPWNFEEVVDKGASAQSFIERMTNFDKNLPNEKVLPKHSLLYEYFTVYNELTKVKYVTEGMRKPAFLSGEQKKAIVDLLFKTNRKVTVKQLKEDYFKKIECFDSVEISGVEDRFNASLGTYHDLLKIIKDKDFLDNEENEDILEDIVLTLTLFEDREMIEERLKTYAHLFDDKVMKQLKRRRYTGWGRLSRKLINGIRDKQSGKTILDFLKSDGFANRNFMQLIHDDSLTFKEDIQKAQVSGQGDSLHEHIANLAGSPAIKKGILQTVKVVDELVKVMGRHKPENIVIEMARENQTTQKGQKNSRERMKRIEEGIKELGSQILKEHPVENTQLQNEKLYLYYLQNGRDMYVDQELDINRLSDYDVDHIVPQSFLKDDSIDNKVLTRSDKNRGKSDNVPSEEVVKKMKNYWRQLLNAKLITQRKFDNLTKAERGGLSELDKAGFIKRQLVETRQITKHVAQILDSRMNTKYDENDKLIREVKVITLKSKLVSDFRKDFQFYKVREINNYHHAHDAYLNAVVGTALIKKYPKLESEFVYGDYKVYDVRKMIAKSEQEIGKATAKYFFYSNIMNFFKTEITLANGEIRKRPLIETNGETGEIVWDKGRDFATVRKVLSMPQVNIVKKTEVQTGGFSKESILPKRNSDKLIARKKDWDPKKYGGFVSPTVAYSVLVVAKVEKGKSKKLKSVKELLGITIMERSSFEKNPIDFLEAKGYKEVKKDLIIKLPKYSLFELENGRKRMLASARELQKGNELALPSKYVNFLYLASHYEKLKGSPEDNEQKQLFVEQHKHYLDEIIEQISEFSKRVILADANLDKVLSAYNKHRDKPIREQAENIIHLFTLTNLGAPAAFKYFDTTIDRKQYRSTKEVLDATLIHQSITGLYETRIDLSQLGGDEGADKRTADGSEFESPKKKRKV

SEQ ID NO: 269 - protein, 1588 aa, Artificial Sequence
  Description of artificial sequence: 04. monoABE8.1_bpNLS + Y123H polypeptide sequence
MSEVEFSHEYWMRHALTLAKRARDEREVPVGAVLVLNNRVIGEGWNRAIGLHDPTAHAEIMALRQGGLVMQNYRLIDATLYVTFEPCVMCAGAMIHSRIGRVVFGVRNAKTGAAGSLMDVLHHPGMNHRVEITEGILADECAALLCYFFRMPRQVFNAQKKAQSSTDSGGSSGGSSGSETPGTSESATPESSGGSSGGSDKKYSIGLAIGTNSVGWAVITDEYKVPSKKFKVLGNTDRHSIKKNLIGALLFDSGETAEATRLKRTARRRYTRRKNRICYLQEIFSNEMAKVDDSFFHRLEESFLVEEDKKHERHPIFGNIVDEVAYHEKYPTIYHLRKKLVDSTDKADLRLIYLALAHMIKFRGHFLIEGDLNPDNSDVDKLFIQLVQTYNQLFEENPINASGVDAKAILSARLSKSRRLENLIAQLPGEKKNGLFGNLIALSLGLTPNFKSNFDLAEDAKLQLSKDTYDDDLDNLLAQIGDQYADLFLAAKNLSDAILLSDILRVNTEITKAPLSASMIKRYDEHHQDLTLLKALVRQQLPEKYKEIFFDQSKNGYAGYIDGGASQEEFYKFIKPILEKMDGTEELLVKLNREDLLRKQRTFDNGSIPHQIHLGELHAILRRQEDFYPFLKDNREKIEKILTFRIPYYVGPLARGNSRFAWMTRKSEETITPWNFEEVVDKGASAQSFIERMTNFDKNLPNEKVLPKHSLLYEYFTVYNELTKVKYVTEGMRKPAFLSGEQKKAIVDLLFKTNRKVTVKQLKEDYFKKIECFDSVEISGVEDRFNASLGTYHDLLKIIKDKDFLDNEENEDILEDIVLTLTLFEDREMIEERLKTYAHLFDDKVMKQLKRRRYTGWGRLSRKLINGIRDKQSGKTILDFLKSDGFANRNFMQLIHDDSLTFKEDIQKAQVSGQGDSLHEHIANLAGSPAIKKGILQTVKVVDELVKVMGRHKPENIVIEMARENQTTQKGQKNSRERMKRIEEGIKELGSQILKEHPVENTQLQNEKLYLYYLQNGRDMYVDQELDINRLSDYDVDHIVPQSFLKDDSIDNKVLTRSDKNRGKSDNVPSEEVVKKMKNYWRQLLNAKLITQRKFDNLTKAERGGLSELDKAGFIKRQLVETRQITKHVAQILDSRMNTKYDENDKLIREVKVITLKSKLVSDFRKDFQFYKVREINNYHHAHDAYLNAVVGTALIKKYPKLESEFVYGDYKVYDVRKMIAKSEQEIGKATAKYFFYSNIMNFFKTEITLANGEIRKRPLIETNGETGEIVWDKGRDFATVRKVLSMPQVNIVKKTEVQTGGFSKESILPKRNSDKLIARKKDWDPKKYGGFVSPTVAYSVLVVAKVEKGKSKKLKSVKELLGITIMERSSFEKNPIDFLEAKGYKEVKKDLIIKLPKYSLFELENGRKRMLASARELQKGNELALPSKYVNFLYLASHYEKLKGSPEDNEQKQLFVEQHKHYLDEIIEQISEFSKRVILADANLDKVLSAYNKHRDKPIREQAENIIHLFTLTNLGAPAAFKYFDTTIDRKQYRSTKEVLDATLIHQSITGLYETRIDLSQLGGDEGADKRTADGSEFESPKKKRKV

SEQ ID NO: 270 - protein, 1588 aa, Artificial Sequence
  Description of artificial sequence: 05. monoABE8.1_bpNLS + V82S polypeptide sequence
MSEVEFSHEYWMRHALTLAKRARDEREVPVGAVLVLNNRVIGEGWNRAIGLHDPTAHAEIMALRQGGLVMQNYRLIDATLYSTFEPCVMCAGAMIHSRIGRVVFGVRNAKTGAAGSLMDVLHYPGMNHRVEITEGILADECAALLCYFFRMPRQVFNAQKKAQSSTDSGGSSGGSSGSETPGTSESATPESSGGSSGGSDKKYSIGLAIGTNSVGWAVITDEYKVPSKKFKVLGNTDRHSIKKNLIGALLFDSGETAEATRLKRTARRRYTRRKNRICYLQEIFSNEMAKVDDSFFHRLEESFLVEEDKKHERHPIFGNIVDEVAYHEKYPTIYHLRKKLVDSTDKADLRLIYLALAHMIKFRGHFLIEGDLNPDNSDVDKLFIQLVQTYNQLFEENPINASGVDAKAILSARLSKSRRLENLIAQLPGEKKNGLFGNLIALSLGLTPNFKSNFDLAEDAKLQLSKDTYDDDLDNLLAQIGDQYADLFLAAKNLSDAILLSDILRVNTEITKAPLSASMIKRYDEHHQDLTLLKALVRQQLPEKYKEIFFDQSKNGYAGYIDGGASQEEFYKFIKPILEKMDGTEELLVKLNREDLLRKQRTFDNGSIPHQIHLGELHAILRRQEDFYPFLKDNREKIEKILTFRIPYYVGPLARGNSRFAWMTRKSEETITPWNFEEVVDKGASAQSFIERMTNFDKNLPNEKVLPKHSLLYEYFTVYNELTKVKYVTEGMRKPAFLSGEQKKAIVDLLFKTNRKVTVKQLKEDYFKKIECFDSVEISGVEDRFNASLGTYHDLLKIIKDKDFLDNEENEDILEDIVLTLTLFEDREMIEERLKTYAHLFDDKVMKQLKRRRYTGWGRLSRKLINGIRDKQSGKTILDFLKSDGFANRNFMQLIHDDSLTFKEDIQKAQVSGQGDSLHEHIANLAGSPAIKKGILQTVKVVDELVKVMGRHKPENIVIEMARENQTTQKGQKNSRERMKRIEEGIKELGSQILKEHPVENTQLQNEKLYLYYLQNGRDMYVDQELDINRLSDYDVDHIVPQSFLKDDSIDNKVLTRSDKNRGKSDNVPSEEVVKKMKNYWRQLLNAKLITQRKFDNLTKAERGGLSELDKAGFIKRQLVETRQITKHVAQILDSRMNTKYDENDKLIREVKVITLKSKLVSDFRKDFQFYKVREINNYHHAHDAYLNAVVGTALIKKYPKLESEFVYGDYKVYDVRKMIAKSEQEIGKATAKYFFYSNIMNFFKTEITLANGEIRKRPLIETNGETGEIVWDKGRDFATVRKVLSMPQVNIVKKTEVQTGGFSKESILPKRNSDKLIARKKDWDPKKYGGFVSPTVAYSVLVVAKVEKGKSKKLKSVKELLGITIMERSSFEKNPIDFLEAKGYKEVKKDLIIKLPKYSLFELENGRKRMLASARELQKGNELALPSKYVNFLYLASHYEKLKGSPEDNEQKQLFVEQHKHYLDEIIEQISEFSKRVILADANLDKVLSAYNKHRDKPIREQAENIIHLFTLTNLGAPAAFKYFDTTIDRKQYRSTKEVLDATLIHQSITGLYETRIDLSQLGGDEGADKRTADGSEFESPKKKRKV

SEQ ID NO: 271 - protein, 1588 aa, Artificial Sequence
  Description of artificial sequence: 06. monoABE8.1_bpNLS + T166R polypeptide sequence
MSEVEFSHEYWMRHALTLAKRARDEREVPVGAVLVLNNRVIGEGWNRAIGLHDPTAHAEIMALRQGGLVMQNYRLIDATLYVTFEPCVMCAGAMIHSRIGRVVFGVRNAKTGAAGSLMDVLHYPGMNHRVEITEGILADECAALLCYFFRMPRQVFNAQKKAQSSRDSGGSSGGSSGSETPGTSESATPESSGGSSGGSDKKYSIGLAIGTNSVGWAVITDEYKVPSKKFKVLGNTDRHSIKKNLIGALLFDSGETAEATRLKRTARRRYTRRKNRICYLQEIFSNEMAKVDDSFFHRLEESFLVEEDKKHERHPIFGNIVDEVAYHEKYPTIYHLRKKLVDSTDKADLRLIYLALAHMIKFRGHFLIEGDLNPDNSDVDKLFIQLVQTYNQLFEENPINASGVDAKAILSARLSKSRRLENLIAQLPGEKKNGLFGNLIALSLGLTPNFKSNFDLAEDAKLQLSKDTYDDDLDNLLAQIGDQYADLFLAAKNLSDAILLSDILRVNTEITKAPLSASMIKRYDEHHQDLTLLKALVRQQLPEKYKEIFFDQSKNGYAGYIDGGASQEEFYKFIKPILEKMDGTEELLVKLNREDLLRKQRTFDNGSIPHQIHLGELHAILRRQEDFYPFLKDNREKIEKILTFRIPYYVGPLARGNSRFAWMTRKSEETITPWNFEEVVDKGASAQSFIERMTNFDKNLPNEKVLPKHSLLYEYFTVYNELTKVKYVTEGMRKPAFLSGEQKKAIVDLLFKTNRKVTVKQLKEDYFKKIECFDSVEISGVEDRFNASLGTYHDLLKIIKDKDFLDNEENEDILEDIVLTLTLFEDREMIEERLKTYAHLFDDKVMKQLKRRRYTGWGRLSRKLINGIRDKQSGKTILDFLKSDGFANRNFMQLIHDDSLTFKEDIQKAQVSGQGDSLHEHIANLAGSPAIKKGILQTVKVVDELVKVMGRHKPENIVIEMARENQTTQKGQKNSRERMKRIEEGIKELGSQILKEHPVENTQLQNEKLYLYYLQNGRDMYVDQELDINRLSDYDVDHIVPQSFLKDDSIDNKVLTRSDKNRGKSDNVPSEEVVKKMKNYWRQLLNAKLITQRKFDNLTKAERGGLSELDKAGFIKRQLVETRQITKHVAQILDSRMNTKYDENDKLIREVKVITLKSKLVSDFRKDFQFYKVREINNYHHAHDAYLNAVVGTALIKKYPKLESEFVYGDYKVYDVRKMIAKSEQEIGKATAKYFFYSNIMNFFKTEITLANGEIRKRPLIETNGETGEIVWDKGRDFATVRKVLSMPQVNIVKKTEVQTGGFSKESILPKRNSDKLIARKKDWDPKKYGGFVSPTVAYSVLVVAKVEKGKSKKLKSVKELLGITIMERSSFEKNPIDFLEAKGYKEVKKDLIIKLPKYSLFELENGRKRMLASARELQKGNELALPSKYVNFLYLASHYEKLKGSPEDNEQKQLFVEQHKHYLDEIIEQISEFSKRVILADANLDKVLSAYNKHRDKPIREQAENIIHLFTLTNLGAPAAFKYFDTTIDRKQYRSTKEVLDATLIHQSITGLYETRIDLSQLGGDEGADKRTADGSEFESPKKKRKV

SEQ ID NO: 272 - protein, 1588 aa, Artificial Sequence
  Description of artificial sequence: 07. monoABE8.1_bpNLS + Q154R polypeptide sequence
MSEVEFSHEYWMRHALTLAKRARDEREVPVGAVLVLNNRVIGEGWNRAIGLHDPTAHAEIMALRQGGLVMQNYRLIDATLYVTFEPCVMCAGAMIHSRIGRVVFGVRNAKTGAAGSLMDVLHYPGMNHRVEITEGILADECAALLCYFFRMPRRVFNAQKKAQSSTDSGGSSGGSSGSETPGTSESATPESSGGSSGGSDKKYSIGLAIGTNSVGWAVITDEYKVPSKKFKVLGNTDRHSIKKNLIGALLFDSGETAEATRLKRTARRRYTRRKNRICYLQEIFSNEMAKVDDSFFHRLEESFLVEEDKKHERHPIFGNIVDEVAYHEKYPTIYHLRKKLVDSTDKADLRLIYLALAHMIKFRGHFLIEGDLNPDNSDVDKLFIQLVQTYNQLFEENPINASGVDAKAILSARLSKSRRLENLIAQLPGEKKNGLFGNLIALSLGLTPNFKSNFDLAEDAKLQLSKDTYDDDLDNLLAQIGDQYADLFLAAKNLSDAILLSDILRVNTEITKAPLSASMIKRYDEHHQDLTLLKALVRQQLPEKYKEIFFDQSKNGYAGYIDGGASQEEFYKFIKPILEKMDGTEELLVKLNREDLLRKQRTFDNGSIPHQIHLGELHAILRRQEDFYPFLKDNREKIEKILTFRIPYYVGPLARGNSRFAWMTRKSEETITPWNFEEVVDKGASAQSFIERMTNFDKNLPNEKVLPKHSLLYEYFTVYNELTKVKYVTEGMRKPAFLSGEQKKAIVDLLFKTNRKVTVKQLKEDYFKKIECFDSVEISGVEDRFNASLGTYHDLLKIIKDKDFLDNEENEDILEDIVLTLTLFEDREMIEERLKTYAHLFDDKVMKQLKRRRYTGWGRLSRKLINGIRDKQSGKTILDFLKSDGFANRNFMQLIHDDSLTFKEDIQKAQVSGQGDSLHEHIANLAGSPAIKKGILQTVKVVDELVKVMGRHKPENIVIEMARENQTTQKGQKNSRERMKRIEEGIKELGSQILKEHPVENTQLQNEKLYLYYLQNGRDMYVDQELDINRLSDYDVDHIVPQSFLKDDSIDNKVLTRSDKNRGKSDNVPSEEVVKKMKNYWRQLLNAKLITQRKFDNLTKAERGGLSELDKAGFIKRQLVETRQITKHVAQILDSRMNTKYDENDKLIREVKVITLKSKLVSDFRKDFQFYKVREINNYHHAHDAYLNAVVGTALIKKYPKLESEFVYGDYKVYDVRKMIAKSEQEIGKATAKYFFYSNIMNFFKTEITLANGEIRKRPLIETNGETGEIVWDKGRDFATVRKVLSMPQVNIVKKTEVQTGGFSKESILPKRNSDKLIARKKDWDPKKYGGFVSPTVAYSVLVVAKVEKGKSKKLKSVKELLGITIMERSSFEKNPIDFLEAKGYKEVKKDLIIKLPKYSLFELENGRKRMLASARELQKGNELALPSKYVNFLYLASHYEKLKGSPEDNEQKQLFVEQHKHYLDEIIEQISEFSKRVILADANLDKVLSAYNKHRDKPIREQAENIIHLFTLTNLGAPAAFKYFDTTIDRKQYRSTKEVLDATLIHQSITGLYETRIDLSQLGGDEGADKRTADGSEFESPKKKRKV

SEQ ID NO: 273 - protein, 1588 aa, Artificial Sequence
  Description of artificial sequence: 08. monoABE8.1_bpNLS + Y147R_Q154R_Y123H polypeptide sequence
MSEVEFSHEYWMRHALTLAKRARDEREVPVGAVLVLNNRVIGEGWNRAIGLHDPTAHAEIMALRQGGLVMQNYRLIDATLYVTFEPCVMCAGAMIHSRIGRVVFGVRNAKTGAAGSLMDVLHHPGMNHRVEITEGILADECAALLCRFFRMPRRVFNAQKKAQSSTDSGGSSGGSSGSETPGTSESATPESSGGSSGGSDKKYSIGLAIGTNSVGWAVITDEYKVPSKKFKVLGNTDRHSIKKNLIGALLFDSGETAEATRLKRTARRRYTRRKNRICYLQEIFSNEMAKVDDSFFHRLEESFLVEEDKKHERHPIFGNIVDEVAYHEKYPTIYHLRKKLVDSTDKADLRLIYLALAHMIKFRGHFLIEGDLNPDNSDVDKLFIQLVQTYNQLFEENPINASGVDAKAILSARLSKSRRLENLIAQLPGEKKNGLFGNLIALSLGLTPNFKSNFDLAEDAKLQLSKDTYDDDLDNLLAQIGDQYADLFLAAKNLSDAILLSDILRVNTEITKAPLSASMIKRYDEHHQDLTLLKALVRQQLPEKYKEIFFDQSKNGYAGYIDGGASQEEFYKFIKPILEKMDGTEELLVKLNREDLLRKQRTFDNGSIPHQIHLGELHAILRRQEDFYPFLKDNREKIEKILTFRIPYYVGPLARGNSRFAWMTRKSEETITPWNFEEVVDKGASAQSFIERMTNFDKNLPNEKVLPKHSLLYEYFTVYNELTKVKYVTEGMRKPAFLSGEQKKAIVDLLFKTNRKVTVKQLKEDYFKKIECFDSVEISGVEDRFNASLGTYHDLLKIIKDKDFLDNEENEDILEDIVLTLTLFEDREMIEERLKTYAHLFDDKVMKQLKRRRYTGWGRLSRKLINGIRDKQSGKTILDFLKSDGFANRNFMQLIHDDSLTFKEDIQKAQVSGQGDSLHEHIANLAGSPAIKKGILQTVKVVDELVKVMGRHKPENIVIEMARENQTTQKGQKNSRERMKRIEEGIKELGSQILKEHPVENTQLQNEKLYLYYLQNGRDMYVDQELDINRLSDYDVDHIVPQSFLKDDSIDNKVLTRSDKNRGKSDNVPSEEVVKKMKNYWRQLLNAKLITQRKFDNLTKAERGGLSELDKAGFIKRQLVETRQITKHVAQILDSRMNTKYDENDKLIREVKVITLKSKLVSDFRKDFQFYKVREINNYHHAHDAYLNAVVGTALIKKYPKLESEFVYGDYKVYDVRKMIAKSEQEIGKATAKYFFYSNIMNFFKTEITLANGEIRKRPLIETNGETGEIVWDKGRDFATVRKVLSMPQVNIVKKTEVQTGGFSKESILPKRNSDKLIARKKDWDPKKYGGFVSPTVAYSVLVVAKVEKGKSKKLKSVKELLGITIMERSSFEKNPIDFLEAKGYKEVKKDLIIKLPKYSLFELENGRKRMLASARELQKGNELALPSKYVNFLYLASHYEKLKGSPEDNEQKQLFVEQHKHYLDEIIEQISEFSKRVILADANLDKVLSAYNKHRDKPIREQAENIIHLFTLTNLGAPAAFKYFDTTIDRKQYRSTKEVLDATLIHQSITGLYETRIDLSQLGGDEGADKRTADGSEFESPKKKRKV

SEQ ID NO: 274 - protein, 1588 aa, Artificial Sequence
  Description of artificial sequence: 09. monoABE8.1_bpNLS + Y147R_Q154R_I76Y polypeptide sequence
MSEVEFSHEYWMRHALTLAKRARDEREVPVGAVLVLNNRVIGEGWNRAIGLHDPTAHAEIMALRQGGLVMQNYRLYDATLYVTFEPCVMCAGAMIHSRIGRVVFGVRNAKTGAAGSLMDVLHYPGMNHRVEITEGILADECAALLCRFFRMPRRVFNAQKKAQSSTDSGGSSGGSSGSETPGTSESATPESSGGSSGGSDKKYSIGLAIGTNSVGWAVITDEYKVPSKKFKVLGNTDRHSIKKNLIGALLFDSGETAEATRLKRTARRRYTRRKNRICYLQEIFSNEMAKVDDSFFHRLEESFLVEEDKKHERHPIFGNIVDEVAYHEKYPTIYHLRKKLVDSTDKADLRLIYLALAHMIKFRGHFLIEGDLNPDNSDVDKLFIQLVQTYNQLFEENPINASGVDAKAILSARLSKSRRLENLIAQLPGEKKNGLFGNLIALSLGLTPNFKSNFDLAEDAKLQLSKDTYDDDLDNLLAQIGDQYADLFLAAKNLSDAILLSDILRVNTEITKAPLSASMIKRYDEHHQDLTLLKALVRQQLPEKYKEIFFDQSKNGYAGYIDGGASQEEFYKFIKPILEKMDGTEELLVKLNREDLLRKQRTFDNGSIPHQIHLGELHAILRRQEDFYPFLKDNREKIEKILTFRIPYYVGPLARGNSRFAWMTRKSEETITPWNFEEVVDKGASAQSFIERMTNFDKNLPNEKVLPKHSLLYEYFTVYNELTKVKYVTEGMRKPAFLSGEQKKAIVDLLFKTNRKVTVKQLKEDYFKKIECFDSVEISGVEDRFNASLGTYHDLLKIIKDKDFLDNEENEDILEDIVLTLTLFEDREMIEERLKTYAHLFDDKVMKQLKRRRYTGWGRLSRKLINGIRDKQSGKTILDFLKSDGFANRNFMQLIHDDSLTFKEDIQKAQVSGQGDSLHEHIANLAGSPAIKKGILQTVKVVDELVKVMGRHKPENIVIEMARENQTTQKGQKNSRERMKRIEEGIKELGSQILKEHPVENTQLQNEKLYLYYLQNGRDMYVDQELDINRLSDYDVDHIVPQSFLKDDSIDNKVLTRSDKNRGKSDNVPSEEVVKKMKNYWRQLLNAKLITQRKFDNLTKAERGGLSELDKAGFIKRQLVETRQITKHVAQILDSRMNTKYDENDKLIREVKVITLKSKLVSDFRKDFQFYKVREINNYHHAHDAYLNAVVGTALIKKYPKLESEFVYGDYKVYDVRKMIAKSEQEIGKATAKYFFYSNIMNFFKTEITLANGEIRKRPLIETNGETGEIVWDKGRDFATVRKVLSMPQVNIVKKTEVQTGGFSKESILPKRNSDKLIARKKDWDPKKYGGFVSPTVAYSVLVVAKVEKGKSKKLKSVKELLGITIMERSSFEKNPIDFLEAKGYKEVKKDLIIKLPKYSLFELENGRKRMLASARELQKGNELALPSKYVNFLYLASHYEKLKGSPEDNEQKQLFVEQHKHYLDEIIEQISEFSKRVILADANLDKVLSAYNKHRDKPIREQAENIIHLFTLTNLGAPAAFKYFDTTIDRKQYRSTKEVLDATLIHQSITGLYETRIDLSQLGGDEGADKRTADGSEFESPKKKRKV

SEQ ID NO: 275 - protein, 1588 aa, Artificial Sequence
  Description of artificial sequence: 10. monoABE8.1_bpNLS + Y147R_Q154R_T166R polypeptide sequence
MSEVEFSHEYWMRHALTLAKRARDEREVPVGAVLVLNNRVIGEGWNRAIGLHDPTAHAEIMALRQGGLVMQNYRLIDATLYVTFEPCVMCAGAMIHSRIGRVVFGVRNAKTGAAGSLMDVLHYPGMNHRVEITEGILADECAALLCRFFRMPRRVFNAQKKAQSSRDSGGSSGGSSGSETPGTSESATPESSGGSSGGSDKKYSIGLAIGTNSVGWAVITDEYKVPSKKFKVLGNTDRHSIKKNLIGALLFDSGETAEATRLKRTARRRYTRRKNRICYLQEIFSNEMAKVDDSFFHRLEESFLVEEDKKHERHPIFGNIVDEVAYHEKYPTIYHLRKKLVDSTDKADLRLIYLALAHMIKFRGHFLIEGDLNPDNSDVDKLFIQLVQTYNQLFEENPINASGVDAKAILSARLSKSRRLENLIAQLPGEKKNGLFGNLIALSLGLTPNFKSNFDLAEDAKLQLSKDTYDDDLDNLLAQIGDQYADLFLAAKNLSDAILLSDILRVNTEITKAPLSASMIKRYDEHHQDLTLLKALVRQQLPEKYKEIFFDQSKNGYAGYIDGGASQEEFYKFIKPILEKMDGTEELLVKLNREDLLRKQRTFDNGSIPHQIHLGELHAILRRQEDFYPFLKDNREKIEKILTFRIPYYVGPLARGNSRFAWMTRKSEETITPWNFEEVVDKGASAQSFIERMTNFDKNLPNEKVLPKHSLLYEYFTVYNELTKVKYVTEGMRKPAFLSGEQKKAIVDLLFKTNRKVTVKQLKEDYFKKIECFDSVEISGVEDRFNASLGTYHDLLKIIKDKDFLDNEENEDILEDIVLTLTLFEDREMIEERLKTYAHLFDDKVMKQLKRRRYTGWGRLSRKLINGIRDKQSGKTILDFLKSDGFANRNFMQLIHDDSLTFKEDIQKAQVSGQGDSLHEHIANLAGSPAIKKGILQTVKVVDELVKVMGRHKPENIVIEMARENQTTQKGQKNSRERMKRIEEGIKELGSQILKEHPVENTQLQNEKLYLYYLQNGRDMYVDQELDINRLSDYDVDHIVPQSFLKDDSIDNKVLTRSDKNRGKSDNVPSEEVVKKMKNYWRQLLNAKLITQRKFDNLTKAERGGLSELDKAGFIKRQLVETRQITKHVAQILDSRMNTKYDENDKLIREVKVITLKSKLVSDFRKDFQFYKVREINNYHHAHDAYLNAVVGTALIKKYPKLESEFVYGDYKVYDVRKMIAKSEQEIGKATAKYFFYSNIMNFFKTEITLANGEIRKRPLIETNGETGEIVWDKGRDFATVRKVLSMPQVNIVKKTEVQTGGFSKESILPKRNSDKLIARKKDWDPKKYGGFVSPTVAYSVLVVAKVEKGKSKKLKSVKELLGITIMERSSFEKNPIDFLEAKGYKEVKKDLIIKLPKYSLFELENGRKRMLASARELQKGNELALPSKYVNFLYLASHYEKLKGSPEDNEQKQLFVEQHKHYLDEIIEQISEFSKRVILADANLDKVLSAYNKHRDKPIREQAENIIHLFTLTNLGAPAAFKYFDTTIDRKQYRSTKEVLDATLIHQSITGLYETRIDLSQLGGDEGADKRTADGSEFESPKKKRKV

SEQ ID NO: 276 - protein, 1588 aa, Artificial Sequence
  Description of artificial sequence: 11. monoABE8.1_bpNLS + Y147T_Q154R polypeptide sequence
MSEVEFSHEYWMRHALTLAKRARDEREVPVGAVLVLNNRVIGEGWNRAIGLHDPTAHAEIMALRQGGLVMQNYRLIDATLYVTFEPCVMCAGAMIHSRIGRVVFGVRNAKTGAAGSLMDVLHYPGMNHRVEITEGILADECAALLCTFFRMPRRVFNAQKKAQSSTDSGGSSGGSSGSETPGTSESATPESSGGSSGGSDKKYSIGLAIGTNSVGWAVITDEYKVPSKKFKVLGNTDRHSIKKNLIGALLFDSGETAEATRLKRTARRRYTRRKNRICYLQEIFSNEMAKVDDSFFHRLEESFLVEEDKKHERHPIFGNIVDEVAYHEKYPTIYHLRKKLVDSTDKADLRLIYLALAHMIKFRGHFLIEGDLNPDNSDVDKLFIQLVQTYNQLFEENPINASGVDAKAILSARLSKSRRLENLIAQLPGEKKNGLFGNLIALSLGLTPNFKSNFDLAEDAKLQLSKDTYDDDLDNLLAQIGDQYADLFLAAKNLSDAILLSDILRVNTEITKAPLSASMIKRYDEHHQDLTLLKALVRQQLPEKYKEIFFDQSKNGYAGYIDGGASQEEFYKFIKPILEKMDGTEELLVKLNREDLLRKQRTFDNGSIPHQIHLGELHAILRRQEDFYPFLKDNREKIEKILTFRIPYYVGPLARGNSRFAWMTRKSEETITPWNFEEVVDKGASAQSFIERMTNFDKNLPNEKVLPKHSLLYEYFTVYNELTKVKYVTEGMRKPAFLSGEQKKAIVDLLFKTNRKVTVKQLKEDYFKKIECFDSVEISGVEDRFNASLGTYHDLLKIIKDKDFLDNEENEDILEDIVLTLTLFEDREMIEERLKTYAHLFDDKVMKQLKRRRYTGWGRLSRKLINGIRDKQSGKTILDFLKSDGFANRNFMQLIHDDSLTFKEDIQKAQVSGQGDSLHEHIANLAGSPAIKKGILQTVKVVDELVKVMGRHKPENIVIEMARENQTTQKGQKNSRERMKRIEEGIKELGSQILKEHPVENTQLQNEKLYLYYLQNGRDMYVDQELDINRLSDYDVDHIVPQSFLKDDSIDNKVLTRSDKNRGKSDNVPSEEVVKKMKNYWRQLLNAKLITQRKFDNLTKAERGGLSELDKAGFIKRQLVETRQITKHVAQILDSRMNTKYDENDKLIREVKVITLKSKLVSDFRKDFQFYKVREINNYHHAHDAYLNAVVGTALIKKYPKLESEFVYGDYKVYDVRKMIAKSEQEIGKATAKYFFYSNIMNFFKTEITLANGEIRKRPLIETNGETGEIVWDKGRDFATVRKVLSMPQVNIVKKTEVQTGGFSKESILPKRNSDKLIARKKDWDPKKYGGFVSPTVAYSVLVVAKVEKGKSKKLKSVKELLGITIMERSSFEKNPIDFLEAKGYKEVKKDLIIKLPKYSLFELENGRKRMLASARELQKGNELALPSKYVNFLYLASHYEKLKGSPEDNEQKQLFVEQHKHYLDEIIEQISEFSKRVILADANLDKVLSAYNKHRDKPIREQAENIIHLFTLTNLGAPAAFKYFDTTIDRKQYRSTKEVLDATLIHQSITGLYETRIDLSQLGGDEGADKRTADGSEFESPKKKRKV

SEQ ID NO: 277 - protein, 1588 aa, Artificial Sequence
  Description of artificial sequence: 12. monoABE8.1_bpNLS + Y147T_Q154S polypeptide sequence
MSEVEFSHEYWMRHALTLAKRARDEREVPVGAVLVLNNRVIGEGWNRAIGLHDPTAHAEIMALRQGGLVMQNYRLIDATLYVTFEPCVMCAGAMIHSRIGRVVFGVRNAKTGAAGSLMDVLHYPGMNHRVEITEGILADECAALLCTFFRMPRSVFNAQKKAQSSTDSGGSSGGSSGSETPGTSESATPESSGGSSGGSDKKYSIGLAIGTNSVGWAVITDEYKVPSKKFKVLGNTDRHSIKKNLIGALLFDSGETAEATRLKRTARRRYTRRKNRICYLQEIFSNEMAKVDDSFFHRLEESFLVEEDKKHERHPIFGNIVDEVAYHEKYPTIYHLRKKLVDSTDKADLRLIYLALAHMIKFRGHFLIEGDLNPDNSDVDKLFIQLVQTYNQLFEENPINASGVDAKAILSARLSKSRRLENLIAQLPGEKKNGLFGNLIALSLGLTPNFKSNFDLAEDAKLQLSKDTYDDDLDNLLAQIGDQYADLFLAAKNLSDAILLSDILRVNTEITKAPLSASMIKRYDEHHQDLTLLKALVRQQLPEKYKEIFFDQSKNGYAGYIDGGASQEEFYKFIKPILEKMDGTEELLVKLNREDLLRKQRTFDNGSIPHQIHLGELHAILRRQEDFYPFLKDNREKIEKILTFRIPYYVGPLARGNSRFAWMTRKSEETITPWNFEEVVDKGASAQSFIERMTNFDKNLPNEKVLPKHSLLYEYFTVYNELTKVKYVTEGMRKPAFLSGEQKKAIVDLLFKTNRKVTVKQLKEDYFKKIECFDSVEISGVEDRFNASLGTYHDLLKIIKDKDFLDNEENEDILEDIVLTLTLFEDREMIEERLKTYAHLFDDKVMKQLKRRRYTGWGRLSRKLINGIRDKQSGKTILDFLKSDGFANRNFMQLIHDDSLTFKEDIQKAQVSGQGDSLHEHIANLAGSPAIKKGILQTVKVVDELVKVMGRHKPENIVIEMARENQTTQKGQKNSRERMKRIEEGIKELGSQILKEHPVENTQLQNEKLYLYYLQNGRDMYVDQELDINRLSDYDVDHIVPQSFLKDDSIDNKVLTRSDKNRGKSDNVPSEEVVKKMKNYWRQLLNAKLITQRKFDNLTKAERGGLSELDKAGFIKRQLVETRQITKHVAQILDSRMNTKYDENDKLIREVKVITLKSKLVSDFRKDFQFYKVREINNYHHAHDAYLNAVVGTALIKKYPKLESEFVYGDYKVYDVRKMIAKSEQEIGKATAKYFFYSNIMNFFKTEITLANGEIRKRPLIETNGETGEIVWDKGRDFATVRKVLSMPQVNIVKKTEVQTGGFSKESILPKRNSDKLIARKKDWDPKKYGGFVSPTVAYSVLVVAKVEKGKSKKLKSVKELLGITIMERSSFEKNPIDFLEAKGYKEVKKDLIIKLPKYSLFELENGRKRMLASARELQKGNELALPSKYVNFLYLASHYEKLKGSPEDNEQKQLFVEQHKHYLDEIIEQISEFSKRVILADANLDKVLSAYNKHRDKPIREQAENIIHLFTLTNLGAPAAFKYFDTTIDRKQYRSTKEVLDATLIHQSITGLYETRIDLSQLGGDEGADKRTADGSEFESPKKKRKV

SEQ ID NO: 278 - protein, 1588 aa, Artificial Sequence
  Description of artificial sequence: 13. monoABE8.1_bpNLS + H123Y123H_Y147R_Q154R_I76Y polypeptide sequence
MSEVEFSHEYWMRHALTLAKRARDEREVPVGAVLVLNNRVIGEGWNRAIGLHDPTAHAEIMALRQGGLVMQNYRLYDATLYVTFEPCVMCAGAMIHSRIGRVVFGVRNAKTGAAGSLMDVLHHPGMNHRVEITEGILADECAALLCRFFRMPRRVFNAQKKAQSSTDSGGSSGGSSGSETPGTSESATPESSGGSSGGSDKKYSIGLAIGTNSVGWAVITDEYKVPSKKFKVLGNTDRHSIKKNLIGALLFDSGETAEATRLKRTARRRYTRRKNRICYLQEIFSNEMAKVDDSFFHRLEESFLVEEDKKHERHPIFGNIVDEVAYHEKYPTIYHLRKKLVDSTDKADLRLIYLALAHMIKFRGHFLIEGDLNPDNSDVDKLFIQLVQTYNQLFEENPINASGVDAKAILSARLSKSRRLENLIAQLPGEKKNGLFGNLIALSLGLTPNFKSNFDLAEDAKLQLSKDTYDDDLDNLLAQIGDQYADLFLAAKNLSDAILLSDILRVNTEITKAPLSASMIKRYDEHHQDLTLLKALVRQQLPEKYKEIFFDQSKNGYAGYIDGGASQEEFYKFIKPILEKMDGTEELLVKLNREDLLRKQRTFDNGSIPHQIHLGELHAILRRQEDFYPFLKDNREKIEKILTFRIPYYVGPLARGNSRFAWMTRKSEETITPWNFEEVVDKGASAQSFIERMTNFDKNLPNEKVLPKHSLLYEYFTVYNELTKVKYVTEGMRKPAFLSGEQKKAIVDLLFKTNRKVTVKQLKEDYFKKIECFDSVEISGVEDRFNASLGTYHDLLKIIKDKDFLDNEENEDILEDIVLTLTLFEDREMIEERLKTYAHLFDDKVMKQLKRRRYTGWGRLSRKLINGIRDKQSGKTILDFLKSDGFANRNFMQLIHDDSLTFKEDIQKAQVSGQGDSLHEHIANLAGSPAIKKGILQTVKVVDELVKVMGRHKPENIVIEMARENQTTQKGQKNSRERMKRIEEGIKELGSQILKEHPVENTQLQNEKLYLYYLQNGRDMYVDQELDINRLSDYDVDHIVPQSFLKDDSIDNKVLTRSDKNRGKSDNVPSEEVVKKMKNYWRQLLNAKLITQRKFDNLTKAERGGLSELDKAGFIKRQLVETRQITKHVAQILDSRMNTKYDENDKLIREVKVITLKSKLVSDFRKDFQFYKVREINNYHHAHDAYLNAVVGTALIKKYPKLESEFVYGDYKVYDVRKMIAKSEQEIGKATAKYFFYSNIMNFFKTEITLANGEIRKRPLIETNGETGEIVWDKGRDFATVRKVLSMPQVNIVKKTEVQTGGFSKESILPKRNSDKLIARKKDWDPKKYGGFVSPTVAYSVLVVAKVEKGKSKKLKSVKELLGITIMERSSFEKNPIDFLEAKGYKEVKKDLIIKLPKYSLFELENGRKRMLASARELQKGNELALPSKYVNFLYLASHYEKLKGSPEDNEQKQLFVEQHKHYLDEIIEQISEFSKRVILADANLDKVLSAYNKHRDKPIREQAENIIHLFTLTNLGAPAAFKYFDTTIDRKQYRSTKEVLDATLIHQSITGLYETRIDLSQLGGDEGADKRTADGSEFESPKKKRKV

SEQ ID NO: 279 - protein, 1588 aa, Artificial Sequence
  Description of artificial sequence: 14. monoABE8.1_bpNLS + V82S + Q154R polypeptide sequence
MSEVEFSHEYWMRHALTLAKRARDEREVPVGAVLVLNNRVIGEGWNRAIGLHDPTAHAEIMALRQGGLVMQNYRLIDATLYSTFEPCVMCAGAMIHSRIGRVVFGVRNAKTGAAGSLMDVLHYPGMNHRVEITEGILADECAALLCYFFRMPRRVFNAQKKAQSSTDSGGSSGGSSGSETPGTSESATPESSGGSSGGSDKKYSIGLAIGTNSVGWAVITDEYKVPSKKFKVLGNTDRHSIKKNLIGALLFDSGETAEATRLKRTARRRYTRRKNRICYLQEIFSNEMAKVDDSFFHRLEESFLVEEDKKHERHPIFGNIVDEVAYHEKYPTIYHLRKKLVDSTDKADLRLIYLALAHMIKFRGHFLIEGDLNPDNSDVDKLFIQLVQTYNQLFEENPINASGVDAKAILSARLSKSRRLENLIAQLPGEKKNGLFGNLIALSLGLTPNFKSNFDLAEDAKLQLSKDTYDDDLDNLLAQIGDQYADLFLAAKNLSDAILLSDILRVNTEITKAPLSASMIKRYDEHHQDLTLLKALVRQQLPEKYKEIFFDQSKNGYAGYIDGGASQEEFYKFIKPILEKMDGTEELLVKLNREDLLRKQRTFDNGSIPHQIHLGELHAILRRQEDFYPFLKDNREKIEKILTFRIPYYVGPLARGNSRFAWMTRKSEETITPWNFEEVVDKGASAQSFIERMTNFDKNLPNEKVLPKHSLLYEYFTVYNELTKVKYVTEGMRKPAFLSGEQKKAIVDLLFKTNRKVTVKQLKEDYFKKIECFDSVEISGVEDRFNASLGTYHDLLKIIKDKDFLDNEENEDILEDIVLTLTLFEDREMIEERLKTYAHLFDDKVMKQLKRRRYTGWGRLSRKLINGIRDKQSGKTILDFLKSDGFANRNFMQLIHDDSLTFKEDIQKAQVSGQGDSLHEHIANLAGSPAIKKGILQTVKVVDELVKVMGRHKPENIVIEMARENQTTQKGQKNSRERMKRIEEGIKELGSQILKEHPVENTQLQNEKLYLYYLQNGRDMYVDQELDINRLSDYDVDHIVPQSFLKDDSIDNKVLTRSDKNRGKSDNVPSEEVVKKMKNYWRQLLNAKLITQRKFDNLTKAERGGLSELDKAGFIKRQLVETRQITKHVAQILDSRMNTKYDENDKLIREVKVITLKSKLVSDFRKDFQFYKVREINNYHHAHDAYLNAVVGTALIKKYPKLESEFVYGDYKVYDVRKMIAKSEQEIGKATAKYFFYSNIMNFFKTEITLANGEIRKRPLIETNGETGEIVWDKGRDFATVRKVLSMPQVNIVKKTEVQTGGFSKESILPKRNSDKLIARKKDWDPKKYGGFVSPTVAYSVLVVAKVEKGKSKKLKSVKELLGITIMERSSFEKNPIDFLEAKGYKEVKKDLIIKLPKYSLFELENGRKRMLASARELQKGNELALPSKYVNFLYLASHYEKLKGSPEDNEQKQLFVEQHKHYLDEIIEQISEFSKRVILADANLDKVLSAYNKHRDKPIREQAENIIHLFTLTNLGAPAAFKYFDTTIDRKQYRSTKEVLDATLIHQSITGLYETRIDLSQLGGDEGADKRTADGSEFESPKKKRKV

SEQ ID NO: 280 - protein, 4 aa, Artificial Sequence
  Description of artificial sequence: synthetic peptide sequence
SGGS

SEQ ID NO: 281 - protein, 5 aa, Artificial Sequence
  Description of artificial sequence: synthetic peptide sequence
PAPAP

SEQ ID NO: 282 - protein, 6 aa, Artificial Sequence
  Description of artificial sequence: synthetic peptide sequence
PAPAPA

SEQ ID NO: 283 - protein, 7 aa, Artificial Sequence
  Description of artificial sequence: synthetic peptide sequence
PAPAPAP

SEQ ID NO: 284 - protein, 8 aa, Artificial Sequence
  Description of artificial sequence: synthetic peptide sequence
PAPAPAPA

SEQ ID NO: 285 - protein, 9 aa, Artificial Sequence
  Description of artificial sequence: synthetic peptide sequence
PAPAPAPAP

SEQ ID NO: 286 - protein, 15 aa, Artificial Sequence
  Description of artificial sequence: synthetic peptide sequence
PAPAPAPAPAPAPAP

SEQ ID NO: 287 - protein, 21 aa, Artificial Sequence
  Description of artificial sequence: synthetic peptide sequence
PAPAPAPAPAPAPAPAPAPAP

SEQ ID NO: 288 - protein, 4 aa, Homo sapiens
  MISC_FEATURE (1)..(4): TXXH motif peptide sequence
  MISC_FEATURE (2)..(3): Xaa is any amino acid
TXXH

SEQ ID NO: 289 - DNA, 31 bp, Homo sapiens
  misc_feature (1)..(31): Target site for base editing the HBG1/2 locus oligonucleotide sequence
cttgccttgaccaatagccttgacaaggcaa

SEQ ID NO: 290 - DNA, 31 bp, Homo sapiens
  misc_feature (1)..(31): Target site for base editing the HBG1/2 locus oligonucleotide sequence
ttgccttgtcaaggctattggtcaaggcaag

SEQ ID NO: 291 - protein, 194 aa, Artificial Sequence
  Description of artificial sequence: cytidine deaminase polypeptide sequence
MKPQIRDHRPNPMEAMYPHIFYFHFENLEKAYGRNETWLCFTVEIIKQYLPVPWKKGVFRNQVDPETHCHAEKCFLSWFCNNTLSPKKNYQVTWYTSWSPCPECAGEVAEFLAEHSNVKLTIYTARLYYFWDTDYQEGLRSLSEEGASVEIMDYEDFQYCWENFVYDDGEPFKRWKGLKYNFQSLTRRLREILQ

SEQ ID NO: 292 - protein, 192 aa, Artificial Sequence
  Description of artificial sequence: cytidine deaminase polypeptide sequence
MADSSEKMRGQYISRDTFEKNYKPIDGTKEAHLLCEIKWGKYGKPWLHWCQNQRMNIHAEDYFMNNIFKAKKHPVHCYVTWYLSWSPCADCASKIVKFLEERPYLKLTIYVAQLYYHTEEENRKGLRLLRSKKVIIRVMDISDYNYCWKVFVSNQNGNEDYWPLQFDPWVKENYSRLLDIFWESKCRSPNPW

SEQ ID NO: 293 - protein, 280 aa, Artificial Sequence
  Description of artificial sequence: cytidine deaminase polypeptide sequence
MDPQRLRQWPGPGPASRGGYGQRPRIRNPEEWFHELSPRTFSFHFRNLRFASGRNRSYICCQVEGKNCFFQGIFQNQVPPDPPCHAELCFLSWFQSWGLSPDEHYYVTWFISWSPCCECAAKVAQFLEENRNVSLSLSAARLYYFWKSESREGLRRLSDLGAQVGIMSFQDFQHCWNNFVHNLGMPFQPWKKLHKNYQRLVTELKQILREEPATYGSPQAQGKVRIGSTAAGLRHSHSHTRSEAHLRPNHSSRQHRILNPPREARARTCVLVDASWICYR

SEQ ID NO: 294 - protein, 555 aa, Artificial Sequence
  Description of artificial sequence: pYY-BEM3.1; tr|F7B644|F7B644_HORSE polypeptide sequence
MPRGRARERQRRNPMEKLDAEAFSFHFLNMEFVYDRNCSYLCYQVEGRLSGSPVLSEQGVFPNEVCGKTRRHAELCFLDWFRGRLSPDEYYCVTWFISWSPCSNCAREVAEFLKRHRNVELSIFAARLYYCRDHEQGLQSLCNRGAQLAVMLRKDFTYCWDNFVHNSGREFSPWENIDANSDLLARKLEDLLKNPMEKLHRKTFSFHFRNLKFAKGRKCSYLCYRVEGRLSGSPGLSEQGVFLNEVCDENCRHAELCFLHWFRGRLSPHADYRVTWFISWSPCSNCAREVAEFLKQHRNVELHISAARLYYWQRNKPGLRNLRSSGAQLAIMFFWDFRDCWDNFVHNSGRHFIPWKKINVNSRLLATKLEDLLKNPLEKLHPNTFSFHFCNLEFAYDRKYSYLCYQVEGRLSGSPGLSEQGVFLNEVCGKTRCHAELCFLDWFRVRLSPDEYYRVTWFISWSPCFYCAREVADFLKQYRNVKLSIFAARLYYCRDHAQGLRSLCSSGAQLAIMFFWDFRYCWDNFVHNSGREFRPWKKINVNSRLLATKLEDILK

SEQ ID NO: 295 - protein, 437 aa, Artificial Sequence
  Description of artificial sequence: pYY-BEM3.2; tr|D1LZA1|D1LZA1_PANTI polypeptide sequence
MEPWRPSPRNPMDRIDPKTFRFQFPNLRYASGRKLCYLCFQVERDYFYYNDSDWGVFRNEVHPWAPCHAEQCFLSWFRDQYPYRDEDYNVTWFLSWSPCPTCAEEVVEFLEEYRNLTLSIFTSRLYYFWHPNYQEGLCKLWDAGVQLDIMSCDEFEYCWDNFVYHKGMRFQRRNLLKDYDFLAAKLQEILSPGQQRKRDWPFPPRPGAQVDPRSWVQEVTEPGINTRRHPLHLLVSFLLPRPTMNPLQEDIFYRQFGNQHRVPKPYYYRRKTYLCYQLKLPEGTLIDKDCLRNKKKRHAEICFIDKIKSLTRDTSQRFEIICYITWSPCPFCAEELVAFVKDNPHLSLRIFASRLYVHWRWKYQQGLRHLHASGIPVAVMSLPEFEDCWRNFVDHQDRLFQPWRNLDQYSESIKRRLGKILTPLNDLRNDFRNLKLE

SEQ ID NO: 296 - protein, 440 aa, Artificial Sequence
  Description of artificial sequence: pYY-BEM3.3; tr|A0A3Q0DM17|A0A3Q0DM17_TARSY polypeptide sequence
MPMKRMYSNIYFDHFNNQRLLSGQNAPWLCFKVERVENCMLVPLETGVFGNQVSGCCGKTERPVEPTSLTRSVLVSPNPGTELRAQQPSRKGHLGKLGCVEYPSPGLALVMLGYGASTYCPDSSMYCPETCHHPEMCFLYWFEKTLSHEEQYQITWYVSWSPCVNCAEEVAEFLSVHPKVNLTIYAARLYCYQKLNHRQGLRRLCKEGACVKIMNYEEFDHCWENFVYNNYKSFKPWVKLQDNYELLATELDKILRIPMERMPQKKFRFHFQNLIAKDRNTTWLCFEVKNVRKKHPPDLLERGIFQNQVTPRINCHAEMCFLSWFLENMLLHGKRYQVTWYISWSPCSICAEEVAEFLSAHPKVSLTIYAARLYYFWVPGYRQGLRRLVEEGARVEIMNYEEFDYCWENFVSINNEPFQPWEGLHEKYGYLVTKLNNILG

SEQ ID NO: 297 - protein, 453 aa, Artificial Sequence
  Description of artificial sequence: pYY-BEM3.4; tr|A0A3Q0DNJ5|A0A3Q0DNJ5_TARSY polypeptide sequence
MEDNPEPRPRQQMDQDTFIFNFNNDPSVRGRHQTFLCYEVEHLDDDTWVPQDKYLGFLHNQPQSRSNAYCAYHAELCFLELVSSWQLDPAQRYRVTCFISWSPCSSCAQEVAAFLKKNRHVTLRILAARIYDYYQGYEDGLRTLQGVGVDITVMTSAEFGHCWNTFVDHQGSPFQPWEGLDQHSQVIWQRMQDILQVIPAKYLMEKVKYTVTVDILFKGRVPGPRYLMDQNTFTRNFINNLSVSGRRQTLLCYEVERLGGDIWVPLDQLRGFLLSQARDVLNYYQGRHAEPCFLDLVSSWQLDPAQHYRVTWFISWSPCTSCAQAVAAFLRENRHVTLRILAARIYDYHQGYEEGLRTLQRTGAHIDIMTFKEFGHCWNTFVNHKGSPFKSWTGLDQHSQALRKRLQDILHTMASSLWDQSEPKKPIPSQEVTLPESIPPSHGNRFRLVKRPS

SEQ ID NO: 298 - protein, 424 aa, Artificial Sequence
  Description of artificial sequence: pYY-BEM3.5; tr|G5AYU5|G5AYU5_HETGA polypeptide sequence
FCFLSCVHRKPIERIYKKAFRFYFRNLRCAYGRNKTFLCYEVKRERDNKVLHKGVVLNQVEPYMPLHAELRFLSWFHDTLLCPLGSYQVTLYVSWSPCSECAEELTTFLAGHRNVTMTIYVAQLYYCNWKSPNREGLKILIAEDARLRVMFYDEFLYCWRNFVKNDYNNFDPWSLLDENSRYHNRILQNILKGWGRPHRVGPEGEQTATPGGSGGHCISVFSLLRRREMTLKEETFRVQFNNAYKAPKPYRRRVTYLCYQLQEANGDPLTKGCLRTKKGYHAESRFIKRICSMDLGQDQSYQVTCFLTWSPCPHCAQELVSFKRAHPHLRLQIFTARLFFHWKRSYQEGLQRLCRAQVPVAVMGHPEFAYCWDNFVDHQPGPFEPPWAKLEYYSSCLKRRLQQILRSWGVDDLTNDFRNLQLGP

SEQ ID NO: 299 - protein, 385 aa, Artificial Sequence
  Description of artificial sequence: pYY-BEM3.6; tr|A0A2Y9QMV5|A0A2Y9QMV5_TRIMA polypeptide sequence
MLSSPQTPGTRKPMKTLAPDEFSFNFENLRLAHGRNTTFLCFQVETKAPPSLNSPDSGIFQNQDHCPSHHHAEMVFLTWFQKRLSPAQHYEVTWYMSWSPCSRCAVQVAKFLKSNSTVNLSIFVARLYYPRELETKDGLHSLWQAGAQVQIMFFQDFKYCWENFVNNEGKPFQPWKNLDENSKDWDTELKDIHRNTTDLLTEEMFYSQFYNREKKSSIPRKTYLCYQLNEPQPVKRCLHYKKGYHAVTRFIDGIVSMNLDPARSYDITCYFTWSPCNRYARKLVSFIEDYPNLRLKVYTSRLYFHWCWTNMQGLQHLQNSRVTVAVMTFRDFEYCWKNFVDNQGKPFEPWEKLDLYSQSTERRLRRILKPLTPDVLNEDFGNLHL

SEQ ID NO: 300 - protein, 381 aa, Artificial Sequence
  Description of artificial sequence: pYY-BEM3.7; tr|H0XHI0|H0XHI0_OTOGA polypeptide sequence
LSCAFRDPMNRMYPKTFCQNFEKEPCPSNQNSSWLCFEVETKNSAVFFHRGVFRNQPAPPPRAPTSVLLSQGPVKTPCHAEECFLTWIQGVLPPDHHYHVTWYVSRGPCANCANLIVHFLAMHRRVTLTIFAAHLNFFWESDFQQGLLRMDQEGVQLHIMGYEEFEYCWDNFVYNQRKQFVPWNGLNENYEFMVSTLEDILRSPLDRIRQKDFSIHFRNSLWLDDKSTWLCFEVKRTKSPVPLYRGVFRNQSPPKTPCHAEVRFFTWLQDLPPDFCCQFTWYLSWSPCADCADLVANFLAKHRNVSLTIFVARLYYYRDPEMHRGLRRMYQEGANVDIMSVIEFEYCWDNFVYNQGKQFVPWNGLNENYEFLVPRLQEILE

SEQ ID NO: 301 - protein, 337 aa, Artificial Sequence
  Description of artificial sequence: pYY-BEM3.8; tr|A0A3M0K4Y7|A0A3M0K4Y7_HIRRU polypeptide sequence
MYISKKALRRHFDPRVYPRETYLLCELQWEGSRRVWIHWIRNVPDHHAEEYFLEEVFEPRNYGFCNITLYLSWSPCCTCCSKIRDFLKRNPNVKIDIRVARLIYPDYAETRSSLRELNGLQRVSIQVMEAAGLSCIESKNHRISQVERDPKGSSSPTLFTLQDHLKLSNMTESVIQDSVSIQICYQMRILGFQCHIRWKLQPEDFQRNYSPNQIGRVVYLLYEVRWRRGSIWRNWCSNNPEQHAEVNFLENHFHHRPQTPCSITWFLSTSPCGKCSRRILEFLKSQPNVTLEIYAAKLFRHHDIRNRQGLRNLMMNGVTIYIMNLEGNPASLCLSVD

SEQ ID NO: 302 - protein, 237 aa, Artificial Sequence
  Description of artificial sequence: pYY-BEM3.9; tr|A0A3P4LUZ8|A0A3P4LUZ8_GULGU polypeptide sequence
MSFEDYEYCWETFVDHKGMYFQSWDLLRDNDLLAAELKNILRSTMNPLRQEIFYHQFGNQPRAPRPYHRRKTYLCYQLQPHEGPITARVCLQNKKKRHAEIRFIDNIRALRLDRSQTFEITCYLTWSPCPTCAKALAVFVQDHPHISLRLFASRLFIHWCWKYQEGLRLLHRSRIPVAVMRLQEFEDCWRNFVDNQDEPFQPWNKLEQYSESITRRLRRILGHPQNNLENDFRNLHI

SEQ ID NO: 303 - protein, 221 aa, Artificial Sequence
  Description of artificial sequence: pYY-BEM3.10; tr|G5BPM8|G5BPM8_HETGA polypeptide sequence
RRRIEPWQFEASFDPRQLRRETCLLSEVRWGTSPRAWRGCSLNTARHAEVSFMDRLTSEGRLRGPVRCSITWFLSWSPCGACAQAIGEFLRQHPNVSLVIYIARLFWHVDEQNRQGLRDLVTRGVRMQVMSDPEFAHCWRNFVNYSPGQEARWPQVPPVWTWLYSLELHCILLNLPPCLKISRRHHNQLTFFQLILQNCHYQAIPSPVLLASGLIHPFVTW

SEQ ID NO: 304 - protein, 211 aa, Artificial Sequence
  Description of artificial sequence: pYY-BEM3.11; tr|H2M862|H2M862_ORYLA polypeptide sequence
MITKLDSVLLPKKKFIYHYKNMRWARGRHETYLCFVVKRRVGPESLSFDFGHLRNRNGCHVELLFLRHLSALCPGLWGYGATGQGRVSYSITWFCSWSPCANCSFRLAQFLSQTPNLRLRIFVSRLYFCDLEDSREREGLRMLKKVGVHITVMSYKDYFYCWQTFVARKQSKFKPWDGLHQNSVRLSRKLNRILQPCETEDFRDAFKLLGL

SEQ ID NO: 305 - protein, 353 aa, Artificial Sequence
  Description of artificial sequence: pYY-BEM3.12; tr|H0Y0C6|H0Y0C6_OTOGA polypeptide sequence
MYLKTFYRHFNNRPYLSRRNDTWLCFEVKTTSSNSPGSFYSGVFRNQGPRYCPWHTELCFLTWVRPIVSHHHFYQITWYMSWSPCANCAWQVATFLATHENVSLTNYTVRIYYFWRQDYRQGLLRMIEEGTQVYVMSSKEFQHCWENFVDHWGTRWVTCWNRLKKNYEFLVTRLSEILSDPKERISPNTFYNQFNNTPVPRGRKDTWLCFEVKEKNSNSPGSFHRGVFQNQVFSGTSSHARRCPPDHHYEVTWYTSWSPCAHCAWHVVNFLTSNPNVSLTIFAARLYYIYRPEIQQGLRRVFQEGAKVHIMSLKEFKYCWAKLVYNSGMRFMPWYQFNFNFLFPNTTLKGDLH

SEQ ID NO: 306 - protein, 189 aa, Artificial Sequence
  Description of artificial sequence: pYY-BEM3.13; tr|A0A3Q2Z5X6|A0A3Q2Z5X6_HIPCM polypeptide sequence
MDVHFMNFIYHYKNMRWAKGRNETYLCFVVKRRVGPNSLTFDFGHLRNRNGCHVELLFLRYLGRRLSYSITWFCSWSPCANCSAALSQFLSRMPNLRLRIFVARLYFCDMEDSHEREGLRLLQKAGVQVTVMSYKDYYYCWQTFVDRKKSHFKAWEDLHQNSVRLSRKLNRILQPCEMDLRDAFKLLGL

SEQ ID NO: 307 - protein, 190 aa, Artificial Sequence
  Description of artificial sequence: pYY-BEM3.15; tr|A0A2K6NY90|A0A2K6NY90_RHIRO polypeptide sequence
MNPHIRNPMEAMYPGTFYFHFKNLWEADNRNESWLCFAVEVIKHHSTVSWKRGVFRNQVDPETHCHAEKCFLSWFCDNTLSPKKNYQVTWYTSWSPCPECAREVAKFLARHSNVMLTIYTARLYYSQYPNYQEGLRRLNEEGVPVEIMDYEDFKYCWENFVYNGDELFKPWKGLKYNFLFLDSKLQEILE

SEQ ID NO: 308 - protein, 202 aa, Artificial Sequence
  Description of artificial sequence: pYY-BEM3.16; tr|Q6ICH2|Q6ICH2_HUMAN polypeptide sequence
MNPQIRNPMERMYRDTFYDNFENEPILYGRSYTWLCYEVKIKRGRSNLLWDTGVFRGPVLPKRQSNHRQEVDPETHCHAERCFLSWFCDDILSPNTNYEVTWYTSWSPCPECAGEVAEFLARHSNVNLTIFTARLCYFWDTDYQEGLCSLSQEGASVKIMGYKDFVSCWKNFVYSDDEPFKPWKGLQTNFRLLKRRLREILQ

SEQ ID NO: 309 - protein, 202 aa, Artificial Sequence
  Description of artificial sequence: pYY-BEM3.17; tr|G8GPV1|G8GPV1_CERNE polypeptide sequence
MDGSPASRPGHVMDPGTFTSNFNNKPWVSGQRETYLCYKVERSHNDTWVLLNQHRGFLRNQAKNRLHGDYGCHAELCFLGEVPSWRLDPTQTYRVTWFISWSPCFSGGCAEQVRAFLQENTHVRLRIFAARIYDYDFLYQEALRTLRDAGAQVSIMTYEEFKHCWDTFVDHQGRPFQPWDGLDEHSQALSGRLQAILQNQGN

SEQ ID NO: 310 - protein, 181 aa, Artificial Sequence
  Description of artificial sequence: pYY-BEM3.18; tr|Q1WBT6|Q1WBT6_SYMSY polypeptide sequence
MALLTAKTFRLQFNNKRRVTKPYYPRKALLCYQLTPQNGSTPTRGYFKNKKKRHAEIRFINKIKSMGLDETQCYQVTCYLTWSPCPSCAWELVDFIKAHDHLNLGIFASRLYYHWCRHQQEGLRLLCGSQVPVEVMGFPEFADCWENFVDHEEPLSFNPSEMLEELDKNSRAIKRRLEKIK

SEQ ID NO: 311 - protein, 211 aa, Artificial Sequence
  Description of artificial sequence: pYY-BEM3.19; tr|A0A3B4CS14|A0A3B4CS14_PYGNA polypeptide sequence
MDNTNRRKFIYHYKNVRWARGRHETYLCFVVKKRNSPDSLSFDFGHLRNRNGCHVELLFLRYIEVLCPGLWGSGVDGVRVSYAVTWFCSWSPCSNCAQRLTNFLSQTPNLRLRIFVARLYFCDEEDSLEREGLRHLQRAGVQITVMTYKDFFYCWQTFVASRERCFKAWEGLRQNSVRLSRKLNRILQVFISTPVISPLITTHLGQSWAGG

SEQ ID NO: 312 - protein, 315 aa, Artificial Sequence
  Description of artificial sequence: pYY-BEM3.20; tr|A0A087XZI4|A0A087XZI4_POEFO polypeptide sequence
RKVSYSVTWFCSWSPCANCSIRLAQFLHQTPNLRLRIFVSRLYFCDLEDSREREGLRILKKAGVHITVMSYKDYFYCWQTFVAKSQSKFKPWDGLHQNYIRLSRKLNRILQPALDIKKFIYHYKNLRWARGRCETYLCFVVKKKLHLFMFVIVGRNRLFDLNVTMNNKSLYLIPLHLQLLFLRHLGALCPGLWGYGVTGERKVSYSVTWFCSWSPCANCSIRLAQFLHQTPNLRLRIFVSRLYFCDLEDSREREGLRILKKAGVHITVMSYKDYFYCWQTFVAKSQSKFKPWDGLHQNYIRLSRKLNRILQVQFF

SEQ ID NO: 313 - protein, 189 aa, Artificial Sequence
  Description of artificial sequence: pYY-BEM3.21; tr|A0A341AEK4|A0A341AEK4_9CETA polypeptide sequence
MASDRGPSAGDATSRRRIEPWEFEVSFDPRELCKETRLLYEIKWGRSQHVWRHSGKNTTNHVECNFIEKFTSERPFHRSVSCCITWFLSWSPCWECSKAIREFLNQHPRVTLFIYVARLFQHMDPQNRQGLRDLIHSGVTIQIMGPTEYDYCWRNFVNYPPGKEAHWPRYPPPLMKLYALELHCIILVP

SEQ ID NO: 314 - protein, 180 aa, Artificial Sequence
  Description of artificial sequence: pYY-BEM3.22; tr|E2D879|E2D879_MUSMI polypeptide sequence
RNLISRETFNFNFENLCYAKGRKNTFLCYEVTRKDCDSPVSLCHGVFKNKGSIHAEICFLYWFHDKVLKVLTPREEFKVTWYMSWSPCFECAEQVVRFLATHHNLNLTIFSSRLYNVSDPDTQQKLCRLVQEGAQVAVMDLSEFKKCWEKFVDNDGQQFRPWKRLRTNFRYQNSKLQEIL

SEQ ID NO: 315 - protein, 221 aa, Artificial Sequence
  Description of artificial sequence: pYY-BEM3.23; tr|A0A2K5RDN6|A0A2K5RDN6_CEBCA polypeptide sequence
MWEAQSPGLSREWGSVAISPEDPGPLHIGRFLSCAFRHPMNAMYPGIFNFHFRNLRKAYGRNETWLCFTVEGIMNRSTVSWKSGVFRNQVGSDPFCHAEMCFLSWFRHNMLSPKKDYEVTWYASWSPCPECAGQVAEFLARHGNVRLTIFTAHLYYFWNPSFRQGLRRLSQEGASVLIMGYEDFEYCWDNFVYNDGQPFKPWKRLQDNSLSLYITLQEILQ

SEQ ID NO: 316 - protein, 206 aa, Artificial Sequence
  Description of artificial sequence: pYY-BEM3.24; tr|A0A2K5RDN7|A0A2K5RDN7_CEBCA polypeptide sequence
MEASPASRPRPLMGPRTFTENFTNNPEVFGRHQTYLCYEVKCQGPDGTRDLMTEQRDFLCNQARNLLSGFDGRHAERCFLDRVPSWRLDPAQTYRVTCFISWSPCFSCAREVAEFLQENPHVNLRIFAARIYDCRPRYEEGLQMLQNAGAQVSIMTSEEFRHCWDTFVDHQGHPFQPWEGLDEHSQALSRRLQAILQGNRWMILSL

SEQ ID NO: 317 - protein, 184 aa, Artificial Sequence
  Description of artificial sequence: pYY-BEM3.25; tr|A0A1C9CJ69|A0A1C9CJ69_CERAL polypeptide sequence
NPMKAMDPHIFYFHFKNLRKAYGRNETWLCFAVEIIKQRSTVPWRTGVFRNQVDPESHCHAERCFLSWFCEDILSPNTDYRVTWYTSWSPCLDCAGEVAEFLARHSNVELAIFAARLYYFWDTHYQQGLRSLSEKGASVEIMGYEDFKYCRENFVCDDGKPFKPWKGLKTNFRFLKRRLQEILE

SEQ ID NO: 318 - protein, 197 aa, Artificial Sequence
  Description of artificial sequence: pYY-BEM3.26; tr|A0A2R2Z4D2|A0A2R2Z4D2_PTEAL polypeptide sequence
MHLQVWRKVTEAWREGYTLKPWSRNPMERLYHDYFYFHFYNLPTPKHRNGCYICYQVEGTKKHSRMPLLRGVFENQESLDMMLSPGEKYRVTWYISWSPCFACVDEVIKFLREHTNVELIIFAARLYHSDILQYRQGLRKLHDAGVHVAIMSYYEFKHCLNDFVFHQGRSFCPWNDLNKNSKNLSNTLEDILRNQED

SEQ ID NO: 319 - protein, 206 aa, Artificial Sequence
  Description of artificial sequence: pYY-BEM3.27; tr|B7T161|B7T161_SHEEP polypeptide sequence
MTEGWAGSGLPGRGDCVWTPQTRNTMNLLRETLFKQQFGNQPRVPPPYYRRKTYLCYQLKELDDLMLDKGCFRNKKQRHAEIRFIDKINSLNLNPSQSYKIICYITWSPCPNCASELVDFITRNDHLNLQIFASRLYFHWIKPFCRGLHQLQKAGISVAVMTHTEFEDCWEQFVDNQLRPFQPWDKLEQYSASIRRRLQRILTAPT

SEQ ID NO: 320 - protein, 205 aa, Artificial Sequence
  Description of artificial sequence: pYY-BEM3.28; tr|A0A2R2X2G4|A0A2R2X2G4_PTEAL polypeptide sequence
MAGLGQACEGCCGQMPEISYPMGRLDPKTFSFEFKNLPYAYGRKSSYLCFQVEREQHSSPVPSDWGVFKNQFCGTEPYHAELCFLNWFRAEKLSPYEHYDVTWFLSWSPCSTCAEEIAIFLSNHKNVRLNIFVSRIYYFWKPAFRQGLQELDHLGVQLDAMSFDEFKYCWENFVDNQGMPFRCWKKVHQNYKSVLRKLNEILRRR

SEQ ID NO: 321 - protein, 309 aa, Artificial Sequence
  Description of artificial sequence: pYY-BEM3.29; tr|G1Q1M4|G1Q1M4_MYOLU polypeptide sequence
YAELSFLDLFQSWNLDRGRQYRLTWYMSWSPYPDCAQKLVEFLGENSHVTLRIFAADIHSLCSGYEDGLRKLRDARAQLAIMTRDELQYCWVTFVDNQGQPFRPWPNLVEHIKTKKQELKDILGNPMRRMYPKTFNFNFQNLNSYGRKSTFLCFEVETWEDGSVLDYQNGVFQNQLDPGHAELCFIEWFHEKVLFPDEVRCPDAQYHVTWYISWSPCFECAEQVAGFLNEHENVDLSISAARLYLCEDEDEQGLQDLVAAGAKVAMMAPEDFEYCWDNFVYNRGWPFTYWKHVRRNYGRLQEKLDEILW

SEQ ID NO: 322 - protein, 216 aa, Artificial Sequence
  Description of artificial sequence: pYY-BEM3.30; tr|A0A1S3AN78|A0A1S3AN78_ERIEU polypeptide sequence
RRIEPWEFEDFFDPRQFRPETCLLYEVRWGSSRNAWRSTARNTTRHAEVNFLERFAAERHFDKPVSCSITWFLSWSPCWECSQAIGAFLSQHPQVTLAIHVTRLFHHEDEQNRQGLRDLLARGVTLQVMGDSEYAHCWRTFVNSPPGAEGHYPRYPSDFTRLYALELHCIILGLPPCLEILRRYQNQFTLFRLVPQNCHYQMIPHLNFFVVRHYFF

SEQ ID NO: 323 - protein, 201 aa, Artificial Sequence
  Description of artificial sequence: pYY-BEM3.32; tr|Q4VUI3|Q4VUI3_XENLA polypeptide sequence
MTMDSMLLKRNKFIYHYKNLRWARGRHETYLCYIVKRRYSSVSCALDFGYLRNRNGCHAEMLFLRYLSIWVGHDPHRNYRVTWFSSWSPCYDCAKRTLEFLKGHPNFSLRIFSARLYFCEERNAEPEGLRKLQKAGVRLSVMSYKDYFYCWNTFVETRESGFEAWDGLHENSVRLARKLRRILQPPYDMEDLREVFVLLGL

SEQ ID NO: 324 - protein, 191 aa, Artificial Sequence
  Description of artificial sequence: pYY-BEM3.33; tr|E2RL86|E2RL86_CANLF polypeptide sequence
MNPLQEETFYQQFSNQRVPKPTYQRRTYLCYQLKPHEGSVIAKVCLQNQEKRHAEICFIDDIKSRQLDPSQKFEITCYVTWSPCPTCAKKLIAFVNDHPHISLRLFASRLYFHWRQKYKRELRHLQKSGIPLAVMSYLEFKDCWEKFVDHKGRPFQPWNKLKQYSESIGRRLQRILQPLNNLENDFRNLRL

SEQ ID NO: 325 - protein, 226 aa, Artificial Sequence
  Description of artificial sequence: pYY-BEM3.34; tr|G1LWB0|G1LWB0_AILME polypeptide sequence
SSAAPASIHLLDEDTFTENFRNDDWPSRTYLCYKVEGPDQGSGVPLGQDKGILHNKPAQGPEPSRHAECYLLEQIQSWNLDPKLHYGVTCFLSWSPCAKCAQKMARFLQENSHVSLKLFASRLYTRERWDEDYKEGLRTLKRAGASIAIMTYREFEHCWKTFVLHDQEGSCFQPWPFLHKESQKFSEKLQAILQVGVLLLSLPPPLPSSPLSSPWPFPAPLRASTG

SEQ ID NO: 326 - protein, 238 aa, Artificial Sequence
  Description of artificial sequence: pYY-BEM3.35; tr|A0A1U7S7K7|A0A1U7S7K7_ALLSI polypeptide sequence
MGEHWQYAGSGEYIPQDQFEENFDPSVLLAETHLLSELTWGGRPYKHWYENTEHCHAEIHFLENFSSKNRSCTITWYLSWSPCAECSARIADFMQENTNVKLNIHVARLYLHDDEHTRQGLRYLMKMKRVTIQVMTIPDYTYCWNTFLEDDGEDESDDYGGYAGVHEDEDESDDDDYLPTHFAPWIMLYSLELSCILQGFAPCLKIIQGNHMSPTFQLHVQDQEQKRLLEPANPWGAD

SEQ ID NO: 327 - protein, 220 aa, Artificial Sequence
  Description of artificial sequence: pYY-BEM3.36; tr|A0A2R2X2J8|A0A2R2X2J8_PTEVA polypeptide sequence
MPRIGNMNLLSEKTFNYHFGNQLRVKKPQGRRRTYLCYKLKLPNETLVKGYFINKKKNHAEIRFINKIRSLNLDQTQSYKITCYITWSPCSYCAGKLVALVKSCPHLSLQIFTSRLYYHWLWKNQAGLRYLWKINISVLVMKEPEFADCWDNFVNHQSRRFKPWEKLTQYSNSTERRLLRILRINRTDLFLAQSSEQDPGLNDLVDAIKRLFLDAHRPRD

SEQ ID NO: 328 - protein, 198 aa, Artificial Sequence
  Description of artificial sequence: pYY-BEM3.37; tr|A0A151P6M4|A0A151P6M4_ALLMI polypeptide sequence
MAVEEEKGLLGTSQGWKIELKDFQENYMPSTWPKVTHLLYEIRWGKGSKVWRNWCSNTLTQHAEVNCLENAFGKLQFNPPVPCHITWFLSWSPCCQCCRRILQFLRAHSHITLVIKAAQLFKHMDERNRQGLRDLVQSGVHVQVMDLPDYRYCWRTFVSHPHEGEGDFWPWFFPLWITFYTLELQHILLQQHALSYNL

SEQ ID NO: 329 - protein, 158 aa, Artificial Sequence
  Description of artificial sequence: pYY-BEM3.38; tr|A0A2K6MNR2|A0A2K6MNR2_RHIBE polypeptide sequence
IWLCFTMEIIKQCSTVSWKRGVFRNQVDPETHCHAERCFLSWFWEDTLSPNTNYQVTWYTSWSPCLDCAGEVAEFLARHSNVKLAIFAARLYYFWDTDYQQGLRSLSEEGTSVEIMGYEDFKYCWENFVYNGDEPFKPWKGLKYNFLFLDSKLQEILE

SEQ ID NO: 330 - protein, 182 aa, Artificial Sequence
  Description of artificial sequence: pYY-BEM3.40; tr|F1CGT0|F1CGT0_ANOCA polypeptide sequence
KAAILLSNLFFRWQMEPEAFQRNFDPREFPECTLLLYEIHWDNNTSRNWCTNKPGLHAEENFLQIFNEKIDIKQDTPCSITWFLSWSPCYPCSQAIIKFLEAHPNVSLEIKAARLYMHQIDCNKEGLRNLGRNRVSIMNLPDYRHCWTTFVVPRGANEDYWPQDFLPAITNYSRELDSILQD

SEQ ID NO: 331 - protein, 230 aa, Artificial Sequence
  Description of artificial sequence: pYY-BEM3.41; tr|C7AGG3|C7AGG3_HORSE polypeptide sequence
MDPQAPTQRGGLGQAYQGGDYVQAPGNGNTQHLLSEDVFKKQFGNQRRVTKPYYRRKTYVCYQLKLLRGPTIAKGYFRNKKKRHAEIRFIDKINSLGLDQDQSYEITCYVTWSPCATCACKLIKFTRKFPNLSLRIFVSRLYYHWFRQNQQGLRQLWASSIPVVVMGYQEFADCWENFADNRGNPFQSWEKLTEYSKGIKRRLQKILEPLNLNGLEDAMGNLKLGSVDLG

SEQ ID NO: 332 - protein, 197 aa, Artificial Sequence
  Description of artificial sequence: pYY-BEM3.42; tr|A0A250YMK7|A0A250YMK7_CASCN polypeptide sequence
MSLLKEDIFLYQFNNQQQVQKPYFRRRTYLCYQLEQPNGSRPQWPAKGCLQNKKGHHAEIRFIKRIHSMGLEQDQDYQITCYITWSPCLACACALAELKNHFPRLTLRIFASRLYFHWIRKFQMGLQHLYKSGVLVAVMSLPEFTDCWEKFVNHRQVFFTPWDKLEEHSRSIQRRLRRILQSWDVDDLTDDFRNLRL

SEQ ID NO: 333 - protein, 189 aa, Artificial Sequence
  Description of artificial sequence: pYY-BEM3.43; tr|B7T160|B7T160_SHEEP polypeptide sequence
MPWISDHVARLDPETFYFQFHNLLYAYGRNCSYICYRVKTWKHRSPVSFDWGVFHNQVYAGTHCHSERRFLSWFCAKKLRPDECYHITWFMSWSPCMKCAELVAGFLGMYQNVTLSIFTARLYYFQKPQYRKGLLRLSDQGACVDIMSYQEFKYCWKKFVYSQRRPFRPWKKLKRNYQLLAAELEDILG

SEQ ID NO: 334 - protein, 541 aa, Artificial Sequence
  Description of artificial sequence: pYY-BEM4.1; tr|A0A182D0J1|A0A182D0J1_BLAVI polypeptide sequence
MTNPESPPQAPCDFNEDALLNREPLRGSPIKFVSPVDYPDLVFALAGPVGVDIDYIQQSISDCLKSFDYSTEFIRITEIMQDIKCSKTIDCTDMLKEYQSKIEYANELRRAYRAKDLLAALTISAISKLREQIKERDEATNKSNIQPSRRKLAWVVRQLKTPEEVRLLRAVYGKQFVLVSIYSSPQRREDFLISKIKIKSRGTIDNNTSSEGAQRLIERDSKEDNEYGQNLSGTFCLGDIFVDSNNKESAIVSIDRFLNAFFGSNEISPTRDEYGMYLAKTASLRSCDLSRQVGAAIFSKTGEIISLGSNEVPKAGGGTYWTGDNADSRDIRLGHDPNEINKVEIFAEIISRLLEDKLLSNDLLNKDAASIVTILLSKNEGKRYKDLRVMDIIEFGRIIHAEMSAICDAARNGRAIIGATLFCTTFPCHLCAKHIVASGIGRIVYLEPYPKSYAKKLHSDSIQVEDHSDSEKVSFEPFIGISPSRYRELFEGGRRKDPFGEALKWKNDPRKPVIDVVVPPHFEAEKLVIAQLGKLIVSGTG

SEQ ID NO: 335 - protein, 330 aa, Artificial Sequence
  Description of artificial sequence: pYY-BEM4.2; tr|A0A2D6EXD2|A0A2D6EXD2_9ARCH polypeptide sequence
MIIGLVGTIGAGKQTIIDYLQEKYGYNALSCSDVLREILKKQGKPVTRDNLREIGNKTREEGGNGAIAKILLEKLRNNWKANYIVDSLRHPDEVSVLRTSPLFHLVAVDADLRIRFERVKARKREEEPTTLPAFVERDQKEMFGTGNEQRIRETMELADELVLNNGTVEELKQRIDDLNLVSDERLRPSWDDYFMRLARLAAQRSNCMSRKVGAIITKDRRVIATGYNGTPRGVKNCNEGGCERCNSAVAKGTAISECLCLHGEENAIIEAGRVRSEGATIYTSFLPCLWCTKMIIQAGLKEVVFSEVYDLHEASIKLFETSGVLIRRLK

SEQ ID NO: 336 - protein, 367 aa, Artificial Sequence
  Description of artificial sequence: pYY-BEM4.3; tr|F7YVM7|F7YVM7_9THEM polypeptide sequence
MNEFKYMSLALKLAKKGKYTTSPNPMVGAVIVKDGKILATGYHKKAGQPHAEINALSKLNFQAQNCEMYVTLEPCSHYGRTPPCADAIIRSGIRKVVIATLDPNPLVNGKGVEKLKNAGIEVVCGVLEEKAKKLNEKFFKYITTKIPFVALKIAQTLDGKIALKNGESKWITSEKSREYVHKLRMEYDAVLTGIGTILKDDPQLNVRLKKVYKQPLRIILDSKLKIPLSAKVLEDPSKVIILTTALADKEKLEELRSKGVEVIITNEKNGIVDLESALKILGEKKITSVMVEAGPTLLTSFLKESLFDKIYLFIAPKIFGADSKSVFSELGLEDISKSQKFSLESVKKIGEDLLLELYPKQLKKLEE

SEQ ID NO: 337 - protein, 449 aa, Artificial Sequence
  Description of artificial sequence: pYY-BEM4.4; tr|A0A3M6UNF1|A0A3M6UNF1_9CNID polypeptide sequence
MEEKSELENELMRSTSPKPSVPNGSKGNECEQRETRITKENLYMVLALWMEEFPVVEQTSSAKRLNKVGVVFVLPTDRVLAADCSRDGVHGVARVMVNHCGKLEGCKVFVSRKPCSLCAKLLVQSKVSRVFYLPIEPESENKGEIARADNLFKNSSVGQSVFVPCVEQKVLDKLEDKLPKEIITPDDISECRDNLLKKCGWSAEWFARAQASLPWPCFEGKMKSQVDNDFKSLIKWIAVVKAPMDKGVAFPKVKLTSDSRVVPDCDADNFPDSKTAYHMMIFAKMLARQTDDPKTGVGAVIVRGKVPDIVSLGWNGFPSKALYGEFPRASDDDRALQKKFPYVIHAEQNALMVRNVKDLTDGILFVTKPPCDECAPMIKLSGVKTIVIGEKIEKSRGGELSYNLIKEYIKEGIMTCYQMEATKTKAKRLASDPETRKRLKSSCSNSNDV

SEQ ID NO: 338 - protein, 414 aa, Artificial Sequence
  Description of artificial sequence: pYY-BEM4.5; tr|A0A2G3K826|A0A2G3K826_9BURK polypeptide sequence
MTKIIDDVNTAAAAVLDQATAAANQTTFAVGGVMVNNQTGEVISAIHNNVIIPLSNNVSFTFDPTAHGERQLVYWYYANKEALKLPEPNQITVITSLDPCAMCTGALLTAGFNVGVVAIDTYAGINCAQNFQFATLPANLRTKAQKNFGYYASGAANFKPLTRSYVGGPSVAFKNGVVTPANLRDCGTVFTQSVDTVRNTSNSTGLAPSQMSNPAELPSNSAILQAYRAIYKKAFTIKIDNPRLPDAQILTELKAVLADAPNARNAVAFIDPFGNLVLCMADAFNTSPVHAAFMNVTQEYAKTRWDLMNKYAQASTTDNPALYLTHPKYGTFVYLYAPDPDDSITIMSLGAYGSTMEGPIPNMFPSNLQFYYPPRNGAQFSELVPVVNELPPFYTQNVNISLMQVPGVTQAPTK

SEQ ID NO: 339 - protein, 308 aa, Artificial Sequence
  Description of artificial sequence: pYY-BEM4.6; tr|K1ZCJ4|K1ZCJ4_9BACT polypeptide sequence
MSSRAKKNRSTNLKKSIGQKSIENKPTDQKKDQVLVAYVPVIHEGYRRFFRHFPAVKELWLISQELSHELRSLQKDIRALKASETKKLLQTWGQFQKIKLLTPSSLAILQKTTTQLVFPDEEISHHLVEKYFAQNRVLFASFFLRWDKKSSLKKHDLQEYSEISNKEFDQMMIAIAQQEADKSDDWWRQVGGLIFKDETILLLAHNQHTPTEAEAYFAGDPRADFHQGEYLKISTAIHAEAYLIAQAAKQGISLEGADLYVTTFPCPVCAKQVAYSGIKRVFFREGYSLLDGETILKANGVKLIRVTV

SEQ ID NO: 340 - protein, 615 aa, Artificial Sequence
  Description of artificial sequence: pYY-BEM4.7; tr|A0A1G3PNQ8|A0A1G3PNQ8_9SPIR polypeptide sequence
MRDLPLLVLGLTGPMGAGCTRFARDISKMEPGKVIKKQGLLDQVAHEISELSKKASEIRLQCISNGKNSELAELKRLNRRLNAKLAERACLHVIAKSSLPEPLFISLNTIVIKIAVDSITAPEFAEWAKNHAKVADLLKWLRTQWESELTLYETWGQDAGRFSQDELEKMDAMFAEFERIGDEILKEDFETYFGKRNNDFSIRMFSENIRLSGNPFRPAENGGGGGKYDEPSMVMIARETDRYIRFYRTRSDQKRSHFFIIDEIKNPREAEYFRARHQNFFLVSIFSSSEIRASRMRRGLGHDAGVSDADFQHLFRELDSRDWGADDFDAHGLHRQNIYRCFNLADIAINNDVEDERFSEVLFNKFIRYYALMLSPGCVQPTPQETYMHLAYSLSLRSTCISRQVGAVITDLEDRILSLGWNEVPEGQIGCGLKVKKDYTDKENPLFEMEIWDNVITAEDLAVWDDEDSICVKDILSRIEIKTKLKSVSLTPEERADVLKALRIKRLEYSRSLHAEENAILQVASRGGVGLKDGTIYVTTFPCELCSKKIYQVGISKIYYTEPYPNSISEKVILKDGIRNIKILQFEGVKSYSYFKLFKPGFDKKDAQMLEGRGI

SEQ ID NO: 341 - protein, 291 aa, Artificial Sequence
  Description of artificial sequence: pYY-BEM4.8; tr|A0A1G0PGF4|A0A1G0PGF4_9BACT polypeptide sequence
MKHNNQLRKEIEKLLGQNSIIKNDELKKLQKEYKIETDELLISFLPYAAEFAKVPISKYKVGAVVLGKSGNIYFGSNMEFEAGALSATVHAEQSAVNNAWLNGETGINKIAVTAAPCGYCRQFLNELTTAKQLHVLLKDKNLEAAKVFKLTELLPEAFGPRDLEIEGGLMKVENHKLKIENINDELINAALEAANKSYAPYSKNYSGVSIQLSDGTIFSGRYSENAAYNPSLLPFQSALAFMNMNTKKGSNNKIVDAVLVEAVSNISQKDAAGTLLNSISKTKLRYYKIKN

SEQ ID NO: 342 - protein, 398 aa, Artificial Sequence
  Description of artificial sequence: pYY-BEM4.9; tr|A0A0P4WGY5|A0A0P4WGY5_9EUCA polypeptide sequence
MEENSSATSQPKCASRTKQGGNDLSTDMSNLSVGETKRTDFLPWDDYFMAVAFLSAMRSKDPSSQVGACIVNADKKIVGIGYNGMPIGCSDDELPWNKESLDPLQTKYMYVCHAEMNAIMNKNSSDLAGCCVYVALFPCNECAKLVIQAGIREVVFFSDKHQQKPETVASKKMLNMAGVAYRQYTPSQSKIELNLSLKEQEKSEPTADITQSSERDQNSKRKDYLSWEEYFMAMAHLSALRSKDPITQVGACIVNSKKKIVGIGYNGMPLGCNDDLMPWGNSSSNKLETKYMYVCHAGVNAIMNKNSCDVSGCTLYVALFPCNECAKVIIQAGIKTIIYASDTNKDQASILASKKMLDMAGIKYRADNLSQRKIVIDFKTIDWNSRFMNDHQNDPTCL

SEQ ID NO: 343 - protein, 259 aa, Artificial Sequence
  Description of artificial sequence: pYY-BEM4.10; tr|A0A3D8IG27|A0A3D8IG27_9HELI polypeptide sequence
MRKNILYFILTLFFLSGLYATSLPEDNVVSGVIYEKIDTVSAEVDHIYPMLALAIVYKDWQEKNMLNKQGHNIGLVIVDENNMPVFWVRNSVHATHNGTQHGEVRLVSNLLNCEGFNKYLDKYTLYTTLEPCIMCAGMLSMVQIPKVVYAQKDLSCGNTQEIISTAKYPRYYKAFTVENGYKKDLEECFEQYKICKNDSITDFLVNDSAKEIFRKASNDLQDYKVKFKENRRVIKVAQEFLQNIQTKDNLDVLQCPKNM

SEQ ID NO: 344 - protein, 256 aa, Artificial Sequence
  Description of artificial sequence: pYY-BEM4.11; tr|A0A351C8C4|A0A351C8C4_9BACT polypeptide sequence
MNELTKQSEHLRNEALRIATRSYVPYTGQQEGVIILLENGDLIPGVRVENASFQLTIPALQNALSTMYALQRTDISMIVSSIPFTDSDLAYTGGMAEIAWEMVGASLLLVAGAHIPEAGTFIDPARGENLLDVSREAALNAFIPESDFPVGSAIQTSDDVVIDGCNVEHSDWSKIICAERNVLSTARSYGLGQITTIYVSCPKEPGGTPCGACRQVIVELAPDATVWMDRGNQEPIAMKATKLLPGHFTGNVLKKQ

SEQ ID NO: 345 - protein, 301 aa, Artificial Sequence
  Description of artificial sequence: pYY-BEM4.12; tr|A0A1G6V2K7|A0A1G6V2K7_PEPNI polypeptide sequence
MPIVRVNEIGARLPEDWEALETAIWQAYVSREDLPDAGELDLTLVDDATIQELNKTHRQLDKSTDVLSFPMYDDRDDLAADVQAGLPVILGDIMISVPTAERQAQAYGHSFKREMAYLLVHGLLHIAGYDHMSAEEKSAMRRAEEAILADVDVPRDTAPSKTAAVLDEADVQALIDAARAARLQAYAPYSGYAVGAALLAADGRRFCGVNVENASYGATCCAERTALFAAVTAGARDFIALALVTEGDEPAPPCGLCRQALAEFSPDLAIYLAGPTGETYRRTSLAALFPEAFSLSTKESV

SEQ ID NO: 346 - protein, 528 aa, Artificial Sequence
  Description of artificial sequence: pYY-BEM4.13; tr|F2NP91|F2NP91_MARHT polypeptide sequence
MPVMETHALEARFKEALARLCPEGRLLAAVSGGGDSVALLYLLKAAGRDTIVAHLDHALRPDSAADAAFVEKLAQRLGFPLETEHVDVRALAHRKRINLEAAAREVRYAFLARVARRWKARCILTAHTLDDNAETVLLQILRGAGRGLGIRPLQRRVARPLLEFSRAELRAYLEARGARWLEDPTNRSLELDRNYLRHAVLPRITARFPHALEALARFSQAQQADDWALEALSARHLIPDRRWPVPAYRALPLERAPEALRRRAIRGVLEALGVRPEARLVADVEAALGGRAQTLPGGVVVRRQRGTLFFIPPTVRFPKVQPPAGLEARPPRPGDYLVFPYGRKRLVDFLNERGVPRELKRRWPVGAVGAEVRWVYGLWPEPDEDRYMRRALVLARAAARQGEVPIGAVLVRDGAVLAEAANAVEASRDATAHAELLALRTALRRVGEKVLPGATLYVTLEPCPMCYGAILEARVARVVYGVENLKAGAFTVHGLEPRVALEAGRVEGECAKVLKDFFARLRPGRDGA

SEQ ID NO: 347 - protein, 226 aa, Artificial Sequence
  Description of artificial sequence: pYY-BEM4.14; tr|A0A316TX77|A0A316TX77_9BACT polypeptide sequence
MINGYTPYSGNQNTCYVKGESGTFYPGVRIENVSYPLTISSVQAAVCSCLANSDNPVEYYTGDHQPELLQVWADEYDMKPGGKLPDSPLKLFDPLVPSIPDIKKELDVLTEKSVTPNSGFPVSALLQTEKGYIRGVNIELSSWALGLCAERVAISRALTAGYTQFKSIHIYAPEADFVSPCGACRQVLLEVMPDADTELYHGDGTLSKHIVSDLLPFGFTSHKLKK

SEQ ID NO: 348 - protein, 321 aa, Artificial Sequence
  Description of artificial sequence: pYY-BEM4.15; tr|R6VYG3|R6VYG3_9FIRM polypeptide sequence
MIHKGTQTIETKRLILRAFTPDDAEAAFENWMSDPKVTEFLRWKTHADISDSRKIVNEWANGSADPEFYQWAIVPKDVNEPIGTISVVDRNDALGIFHIGYCIGSKWWHKGITSEAFSAVIHFLFEEVGANRIESQHDPENIHSGDVMKKCGLTFEGTLRQADFNNRGIVDACVYSILQSEWQNNTSVWQRLYNAALTVQNDRVVSPFIDAGGVAAALMTKKGNIYTGICIDTASTLGMCAERNAVANMLTNGESRIDKIVAVMPDGKVGAPCGACREYMMQLDRDSGDIEILLDLETEKTVRLKDLIPDWWGAERFGDTE

SEQ ID NO: 349 - protein, 229 aa, Artificial Sequence
  Description of artificial sequence: pYY-BEM4.16; tr|A0A3C1HZ18|A0A3C1HZ18_9BACI polypeptide sequence
MGDIMENWNELSEPWKRCFLQAWKAYCHGSIPIGAVLVDSEGEIFLEGRNRVHELTAPEGQLCDCRIAHAEMNVLVQVKTSDYEKLSGATIYSTMEPCIQCFGAIILSRIKNISFAAIDDKLAGATTLEDRHGFIKSRNLNIAGPFSHLGEIQIILRTDFLLRIFDSEYADPLIAAHEKDYPIGVALGRHYHRNNRLQVAKKETIPFGELFNEFSFDIKRAREGYTLGK

SEQ ID NO: 350 - protein, 205 aa, Artificial Sequence
  Description of artificial sequence: pYY-BEM4.17; tr|A0A1M6KV24|A0A1M6KV24_9BACT polypeptide sequence
MEASQQNILLKIEGKGPVAEINFTVTLPEWLVEQVQSGSTVFLTQKEKMRFVLELARKNVAQETGGPFAAAVFSLESGELVSAGVNVVVESRCSSAHAEVVALSLAQKAVDSHDLGAAGLPRMVLVSSAEPCAMCMGAIPWSGVKQVICGARDEDVRSVGFDEGAKPLEWVEDFAERGIEVIRDVLREEATEVLWDYRERGGEIY

SEQ ID NO: 351 - protein, 207 aa, Artificial Sequence
  Description of artificial sequence: pYY-BEM4.18; tr|A0A2U0T9B4|A0A2U0T9B4_9RHIZ polypeptide sequence
METAELISRLLDVIEKDIAPVTAKGVARGNKLFGAAILKKSDLAVIVAETNNEIENPLWHGEMQAIKRFFELPADQRPATRDCLFLATHEPCSLCLSGITWSGFDNFYYLFSHQDSRDGFAIPYDIQILKSVYAVPEPETGTVSPARDLYNRSNDFWTSHGLQDMIAGLARSNREALLARIDDLNALYAELSERYQRDKGGKGIPLP

SEQ ID NO: 352 - protein, 231 aa, Artificial Sequence
  Description of artificial sequence: pYY-BEM4.19; tr|A0A2K9PN08|A0A2K9PN08_9FLAO polypeptide sequence
MSDKKESKIKISKTSESIELDEIHSLLSYSIVQKFWENDDRNGRGYNVGVILVDENKNIVDWDINSVNKTENSTQHGEMRLISRYLDKDELYSLKGYTMYPTLEPCAMCAGMMTMTNVYRTVNGQMDYFYSKALERLSIDTRECGGYPPYPRTVISEISPSSISTRLDAEYKQYTNAGNKPIITKFLSTYKAKTIYDDAFNQFINFKCKFPENKTKYENAIKFYNSLPESI

SEQ ID NO: 353 - protein, 330 aa, Artificial Sequence
  Description of artificial sequence: pYY-BEM4.20; tr|F4PWM7|F4PWM7_CAVFA polypeptide sequence
MRFSLSLLFVILSVLLAGVLACKDPYNPETVDYGQCASATKANYEVRSDSKVLTPADLPADELAVHESRMRHIIDIARVNNKKFVSSIYFPNGTLACIGINTGKPNMIAHGEIVAIQNCTEIHGISMYTNYSIYTTGEPCSMCASAILWSRFKTVVWSTYNSDLYCKICMSNIPIDSSYIFSRAYGLGIEAPVAIGGVVKAEGDAWFGTYCNRPTSIYYIAPKCACQDPAKVSPLKFTQTRTTVWVEGGDKVVTQWNAIISNPSNSTIVDPPIVISPSVVFKGAPWGISAASEPNTYKLSYNKVLFPGQTFSFGYSVYGLEEVAFTALEA

SEQ ID NO: 354 - protein, 193 aa, Artificial Sequence
  Description of artificial sequence: pYY-BEM4.21; tr|U7QZM1|U7QZM1_PHOTE polypeptide sequence
MNKTRRKLLATLGIMSISMSFIAQAGEKKTQVINNILSKQEITEHEKYMREAIKEAIKNPKHPFGAVIVNRNNGEILSRGVNTGRNNPILHGEIQAINHYITQYGNQGWENVALYTTGEPCSMCMSALVWIGIREVIWATSISVIRNSGIRQIDISAHEIAERASSFYNPITLVGGILANETDKLFLERKRGN

SEQ ID NO: 355 - protein, 319 aa, Artificial Sequence
  Description of artificial sequence: pYY-BEM4.22; tr|A0A081CH48|A0A081CH48_PSEA2 polypeptide sequence
MASRRHLLATQVTGNHRKLSLWHLRGWLSPYTKLVDAVYFLTTNSFYHSLQTPPVQSITMLLSSIITSLALAAQASAYREGLHPEFQSGLSINSVPATDRDHWMRLANSAIYYPPVSHPCPQAPFGTAIVNTTSNELICAIANRVGSTGDPTQHGEITAIQHCTNVMRKKGLSPQEIIAAWKQLSLYTNAEPCTMCLSAIRWAGFKEVIYGTSVGTISENGRNQIYIPSNLVLEKSYSFGHATLMLGNILTHETDPFFQHQFNESAPCPVGCERTQVGEARVKTCEPVPNWQKLVRLEYSEDSRVGSEPVAHTPLHLEL

SEQ ID NO: 356 - protein, 203 aa, Artificial Sequence
  Description of artificial sequence: pYY-BEM4.23; tr|A0A3D3HMU1|A0A3D3HMU1_9GAMM polypeptide sequence
MDYSDAILGAITSIRRNSKQPGVNVTDNVTDSSTQYNNDEYWMRRALALAREAGEAGEIPVGAVLVKDNQQVAGGFNQPIRSHDPAAHAEILTLREAGAVLGNYRLIDTTLYVTLEPCMMCAGALVHSRIKRLVFGAAEPKTGAAGSFIDLLTLPRLNHYMEVTGGVLGEECSVLLSDFFRRRRAEKKALKRQNSESGSDSAS

SEQ ID NO: 357 - protein, 270 aa, Artificial Sequence
  Description of artificial sequence: pYY-BEM4.24; tr|A0A1N5WT13|A0A1N5WT13_9ACTN polypeptide sequence
MLEKIERRLVAAAEAVVRSPSTGDAHTVAAAAMDANGDIYSGVNVFHFTGGPCAELVVIGSAAAANAPPLITIVAVGDGDRGVIAPCGRCRQVMLDLHPDVFVIVPTGDGQLAAKPVRELLPFGYVARTGSTAPRVVYFHPRHYDTISSGLKTATVRFQDSVQTGPAVFVFDDGESIRRLDAVVEKVESRRLDHLTEEDAHHEALPDSDALRDAIKTQYPMLGDGDVVDVATFRLTAISAPDPDPRSSYPPAVSRCNPAGPRADLLVGQS

SEQ ID NO: 358 - protein, 257 aa, Artificial Sequence
  Description of artificial sequence: pYY-BEM4.25; tr|X0SAC5|X0SAC5_9ZZZZ polypeptide sequence
MTKDGRVIASAHDTEVTDQDSTAHAEINAIRKASKIYRKDLTGCLIISTHEPCPMCTGSIIWSNISKVVYGVSIRDSIKAGRDMINLSCKEIIKKPNAEINIYDGILKKECLKLYNNDTRKLVKKFRKYEWINIEENLLNKRMQWFENNKTMIRKLKGNDLEKAYHLILMKIGIKRSEAPIVKKSESKIIFHSKNYCPSLEACIILDLDTREVCKEIYERPTEELIRRLNSKLRFTRNYDCIRPYSDYCEEIIILEK

SEQ ID NO: 359 - protein, 154 aa, Artificial Sequence
  Description of artificial sequence: pYY-BEM4.26; tr|A0A3B8IC10|A0A3B8IC10_9BACT polypeptide sequence
MPSHEDFIHQCLELGKEALLQGNPPVGSVIVWQDQVIGRGIENGRSSGDITQHAELLALQEAVATGQRDKLKEAIIYSTHEPCVMCAYPIRQYKIPTVVYSVAVPELGGHTSSWHLLTTEDVPKWGKAPKIITGISAEEVEALNAAFQDSLKKG

SEQ ID NO: 360 - protein, 180 aa, Artificial Sequence
  Description of artificial sequence: pYY-BEM4.27; tr|A0A2N9P8B9|A0A2N9P8B9_9FLAO polypeptide sequence
MFIFKLISPPVSIEVYQDKIIQKLYICFMENIFTDEYFMKKALQEAETAFQQGEIPVGAVIVIDNRIIARSHNLTEMLNDVTAHAEMQAITASANFLGGKYLKDCTLYVTLEPCQMCAGALYWSQISKIVYGATDEQRGYRAMGAQLHPKTKVISGIMQNECTHLMKDFFKQRRSKSTKD

SEQ ID NO: 361 - protein, 178 aa, Artificial Sequence
  Description of artificial sequence: pYY-BEM4.28; tr|K1KX30|K1KX30_9BACT polypeptide sequence
MVKNPVNNNELYFGKHSEIPMNEEQKAYMKMAVDLSRSGMESGKGGPFGCVIVKDGKVIGIGSNSVLETNDPTAHAEIVAIRDACRNLGHFQLDGCEVYTSCEPCPMCLGAIYWARPSKVFFANDKRDAAEAGFDDDFIYQELELPYEKRKIPFEQGMQDTAKEVFQEWILKEDKTLY

SEQ ID NO: 362 - protein, 196 aa, Artificial Sequence
  Description of artificial sequence: pYY-BEM4.29; tr|R4XI84|R4XI84_TAPDE polypeptide sequence
MSSEIEPPSTDVHKHAVAEAADESGAADAFMQIALQQAETALLNKEVPVGCVFVHQPTGTVLATGANQTNASLNGTLHAEFVAIESILRDHPPSIFRESDLYVTVEPCVMCASALRQLQVRKVYFGCGNDRFGGCGSVFSIHSDASKTGDAAYMVESGIFRKEAIMLLRRFYLLQNESAPKPALKSTRVLKEHFDE

SEQ ID NO: 363 - protein, 212 aa, Artificial Sequence
  Description of artificial sequence: pYY-BEM4.30; tr|A0A239CVF7|A0A239CVF7_9DELT polypeptide sequence
MSPASKKHFPSLFSFLLLTIGLICGTAHAQPQGHTADDTAATLANASLKEHEPFIRRCYQLAIDAGKKGNHPFGALLVHKGKIVLEAENTVLTDNDFTNHAEMNLIAEAARTLSRQIIPEATVYTSCAPCAMCTATLAMAGFTRIVYGVSHDALNKRFGLKGKSVSCPALFKTMGMELEFVGPVLEKEGLRVFDFWPEKDPHAQMLKKQARK

SEQ ID NO: 364 - protein, 320 aa, Artificial Sequence
  Description of artificial sequence: pYY-BEM4.31; tr|A0A1Q3NME1|A0A1Q3NME1_9BACT polypeptide sequence
MTEFNYDWAKLAFSSKRPLTNLKATFIIAPREISEKRFTQLLKEYLPKGDILLGISKEDYVEGLEGQPQFAMLQQKTLQKLIDKVNDASAHKVYTLRYFQRELPAIIEKLTPPRVVGIHGSWHHSFHTLPIYYLLSEKRIPYQLVAAFSDEDEARAYEVATDKKIVRPTLEGSFDDTTVLQLTDEVAKSSYDYGFQTGAILAEKVNGVYQPVAAGFNKVVPYQTYALLNGASRETNFSPANDMNHYDTIHAEMQILVEAAKQGISLKDKTLFVNLMPCPSCARTLSQTELSEIVYRIDHSGGYAVDLLTKVGKDIRRIVY

SEQ ID NO: 365 - protein, 180 aa, Artificial Sequence
  Description of artificial sequence: pYY-BEM4.32; tr|A0A2G6N4N7|A0A2G6N4N7_9DELT polypeptide sequence
MKERTVSYSDRHFMAEALEMAESALTQGEFPVGCVIADGTAVVARGHRTGTTAGAVNEIDHAEINALRHLGLAGEHLDRTDLTIYSTMEPCLMCFAAIVLSGINRIVYAYEDVMGGGTGCDLTGLPPLYRDAPLTLVAGVRRRASLNLFRRFFTDPENGYWAGSLLSRYTLNQTKDSHRL

SEQ ID NO: 366 - protein, 156 aa, Artificial Sequence
  Description of artificial sequence: pYY-BEM4.33; tr|A0A0G0RBB8|A0A0G0RBB8_9BACT polypeptide sequence
MQSVQYNKLTHLQRRALDEAEQVLENSYNPYSHFYVGACLISEDEQLIAGTNFENAAYGSAICAERAAVLRANAMSIRRFRGIAIIARGEDFNTTEVTGPCGSCRQVLYEISQVSGCDLQVILATSKKDKIVITTIRELLPLAFGPLDLGVDIGKY

SEQ ID NO: 367 - protein, 217 aa, Artificial Sequence
  Description of artificial sequence: pYY-BEM4.34; tr|A0A327L2Q5|A0A327L2Q5_9RHIZ polypeptide sequence
MVTSRDGEDEAMMARCVALSRIAVGKGEYPFGAVVAREGRIVAEAINRTIRDGDVSRHAEVIALARAQKAIGRRELRECSLYSNVEPCAMCSYCIREAWVGRVVYALGSPVMGGVSKWNILRDDGLSGRMPQVFDAAPEVVSGVLVEQAQAAWRDWSPLAWEMITLRGLMTDPSARPECRTRAARPRSLWHHLVALIERPPRPYVDPTSAAEGHADL

SEQ ID NO: 368 - protein, 162 aa, Artificial Sequence
  Description of artificial sequence: pYY-BEM4.35; tr|S2DR30|S2DR30_9BACT polypeptide sequence
MKMKKKIEITVSLEVIQKSEWSKEDRSLIERAIHAVEHAHAPYSNFMVGTALLLDNGQIFSANNQENVSFPVGICAERAVLSYAMGNFPNNRPVKLAVVAKRRSDSTWATVTPCGLCRQTINEYEVKFGHPIEILMLNPGEEILKASGIDQLLPFRFNDLNS

SEQ ID NO: 369 - protein, 153 aa, Artificial Sequence
  Description of artificial sequence: pYY-BEM4.36; tr|A0A369QGF1|A0A369QGF1_9BACT polypeptide sequence
MEEHEKWMHWCLNLAQQALQQGDFPVGAVVVQKGKLIGQGVEAGQLKKDITCHAEMEAIRDARQTINTADLQNCILYSTHEPCIMCSYVIRHHKISRVVVGTTVPEVGGSSSAYPLLSAPDISIWVAPPHLVTGVLAEACQALSQAYKQKFKK

SEQ ID NO: 370 - protein, 159 aa, Artificial Sequence
  Description of artificial sequence: pYY-BEM4.37; tr|A0A1W6X4U4|A0A1W6X4U4_9RHIZ polypeptide sequence
MTNPSRQERWDRRFLELAKVFGTWSKDRSAGTGCVIVGPDRLLRASGYNGFARGIDDEVPERHERPAKYSWTEHAERNAIYNAAKLGISLDGCTAYVNWFPCIDCARAIVQAGIVRLVGLHPDHADQRWGSEFKFATEMLRESGIEIILYDIPELAARK

SEQ ID NO: 371 - protein, 490 aa, Artificial Sequence
  Description of artificial sequence: pYY-BEM4.38; tr|A0A238BW09|A0A238BW09_9BILA polypeptide sequence
MEEMARKIRTKAKKANSYCNTMTFLISKASIVLLKAECKRIELTVVIFRFLIKMNASEPNNELCDMTVIKSMLKITHVIFDLDGLLIDTEVVFSKVNQCLLSKYNKKFTPHLRGLVTGMPKKAAVTYILEHEKLSAKVDVDEYCKKYDEMAEEMLPKCSLMPGVMKLVRHLKTHSIPMAICTGATKKEFEIKTRYHKELLDLISLRVLSGDDPAVKRGKPAPDPFLVTMDRFKQKPEKAENVLVFEDAANGVCAAIAAGMNVIMVPDLTYMKIPEGLQNKINSFSDNLIISNDLNVALMSLKKELSEEEVHFLNRAFEIAVDAVLNNEVPVGCVFVFEGQEVAFGRNDVNRTKNPTYHAEMVALKMMKQWCMDNGRDLEEIMRRTTLYVTLEPCIMCASALYHLRLKKILYGAANERFGGLVSVGTREKYGAKHFIEIMPNLSVDRAVKLLKEFYEKQNPFCPEEKRKVKKPKKSGNNNDNSDDAVALNV

SEQ ID NO: 372 - protein, 159 aa, Artificial Sequence
  Description of artificial sequence: pYY-BEM4.39; tr|A0A1J5H6Z0|A0A1J5H6Z0_9BACT polypeptide sequence
MAYQPSEKFMQMAIDKTREGVLSGQTPFGACIVKDGKVVACEHNTVWQDTDITSHGEVHTIRAACKAIGSIDLSGCILYSTCEPCPMCFSAIHWARIDTVVYGAFIADAQDAGFNELTISNEKMKEFGGSPVNFISGFMRDENVALFKLWKEQGANNVY

SEQ ID NO: 373 - protein, 168 aa, Artificial Sequence
  Description of artificial sequence: pYY-BEM4.40; tr|A0A3C2D945|A0A3C2D945_9BACT polypeptide sequence
MKTTEIRIIVHEYQNIDELTENDQYLLHEARRITEFAYAPYSGFHVGAAILLGNGMIVKGNNQENSAYPSGLCAERVALFYANANYPDSEVKTIAISAAKNGILVNDPIKPCGGCRQTLSEAEVRFGSPIRIILDGQDSILVLHGVESLLPLSFSKKDLASPLAATGR

SEQ ID NO: 374 - protein, 214 aa, Artificial Sequence
  Description of artificial sequence: pYY-BEM4.41; tr|A0A1I7EYS3|A0A1I7EYS3_9BURK polypeptide sequence
MKFKLDPSRPPDEDDYYLGVALAVRRKANCTGNRVAAVIVKNKRVIATGYNGVPEDMPNCLDGGCLRCSNPGGQFKSGTRYDLCICVHAEQNALLTAARFGISVEGAHLYTTMQPCFGCAKEILQAKIEKVFYLHPWVPTDVDPVMDAAMKAEYAKIIGKLKVKKLDFDDPVATWAVTTMRQAALASDKNPDKKTPPKTAKKKVAKKKSRTSPR

SEQ ID NO: 375 - protein, 155 aa, Artificial Sequence
  Description of artificial sequence: pYY-BEM4.42; tr|H8GQX8|H8GQX8_METAL polypeptide sequence
MNHEHFMRRAIELARQAPQYPFGAVIVRRDDGQCVGQGFNRSDLNPTYHGEMVAINDCAVRHCAEDWRGFDLYTTAEPCAMCQGAIEWAGIGRVFYGTSIPYLQKLGWWQIDLRAAEVSARAVFRDTLIVGGILETECNALFAAARRGCFGTGSE

SEQ ID NO: 376 - protein, 156 aa, Artificial Sequence
  Description of artificial sequence: pYY-BEM4.43; tr|A0A0S8HZN3|A0A0S8HZN3_9CHLR polypeptide sequence
MDEHDIRFLRASFDVARNARKNGNHPFGALLVDEHGRIVMEAENTVITAKDCTGHAETNLMREASSKYDSDFLANCTIYTSTEPCPMCAGAIFWSNVRRVVYGLSEESLYEIAGRGSEEVLFLSCREIFERGKKLIEVIGPLLEDEAREVHMGFWR

SEQ ID NO: 377 - protein, 193 aa, Artificial Sequence
  Description of artificial sequence: pYY-BEM4.44; tr|E3SF31|E3SF31_9CAUD polypeptide sequence
MKPTTVLQIAYLVSQESKCCSWKVGAVIEKNGRIISTGYNGSPAGGVNCCEHAEEQGWLLNKPKPVLIPGHKSECVRFSQVDRFVLAKAHREAHSAWSKNNEIHAELNAILFAARMGSSIEGATMYVTLSPCPDCAKAISQSGIKKLVYCETYDKNIPGWDDILKNAGIEVFNVPKRSLDKLNWENINEFCGE

SEQ ID NO: 378 - protein, 330 aa, Artificial Sequence
  Description of artificial sequence: pYY-BEM4.45; tr|F8AAC6|F8AAC6_THEID polypeptide sequence
MIRAPWHEYFMLLAKIVALRSGCNSRPSGAVIVKNKRILATGYNGPMPGAWHCTDRGPGYCFRREKGIPDIDKYNFCRATHAEANAIAQAARFGISVEGASLYCTLAPCYVCLKLIASAGIKKVYYEHDYGSRDFERDQFWKEAIKEAGLEKFEQITVSQEVMEQLQEILPYPTSKRRLAPTEFLDEFEDGKKYGVPSIEVLFNKLNYLTRQALKDITFVIEKTTVTEEPEGISFYLSGKMVELSELINTVKKQINADQNFYFLAKHNAIEAKIEILREAENIRLKAFLNECPLESFKRIAESLDYILYQVSNSLSLPTRLELSVNLLRI

SEQ ID NO: 379 - protein, 158 aa, Artificial Sequence
  Description of artificial sequence: pYY-BEM4.46; tr|A0A2H4ZNK4|A0A2H4ZNK4_9EUKA polypeptide sequence
MKKQLSRKIQEEWMSRLLRNAYDAGTYGEVPIAAVILNESGQCIGWGRNCREKDQNPLGHAEIIALRQASYLKKSWRFNECTMLVTLEPCPMCAGALLQARINHIIYGASDYKRGGFGGVLDLSKNSSAHHKIEITRGVKSIQSCQLLETWFRRRRRV

SEQ ID NO: 380 - protein, 176 aa, Artificial Sequence
  Description of artificial sequence: pYY-BEM4.47; tr|A0A239N5N1|A0A239N5N1_9PSED polypeptide sequence
MEGRAGIIPFDEGGAAMGPAEEDSPMQHLAYMREALALARANVEAGGRPFGAVLVRDGEVIARAANGTHLDHDPTAHAELLALRAAGRALGSPRLDGCVVYASGHPCPMCLAAMHLSGVSAAYYAYSNADGEPYGLSTAAVYAQMAQPVEWQSLPLQALRPEDEEGLYGFWRERRP

SEQ ID NO: 381 - protein, 199 aa, Artificial Sequence
  Description of artificial sequence: pYY-BEM4.48; tr|A0A328VTR2|A0A328VTR2_9PSED polypeptide sequence
MHPEHLALLQQAPASTHADDTWARLCCEQALLAVEEGCYAVGALLVDGAGELLCSGRNQVFAPAYASAAHAEMRVLDQLEAEHAQVDRRSLTLYVSLEPCLMCYGRILLAGITRVRYLARDRDGGFALRHGRLPPAWANLASGLSVVQAKADPYWLDLAEHAIGRLQDRQTLRQRVIRAWRGQRTLTDEFSSTKRTHSG

SEQ ID NO: 382 - protein, 402 aa, Artificial Sequence
  Description of artificial sequence: pYY-BEM4.49; tr|A0A103YG48|A0A103YG48_CYNCS polypeptide sequence
YIRELHASSLRRDEHEIQNPKILVIVDRLSSPSLHVSLSLSLSLVIFPPFIPLNQTPTHMENAKVVEAKDGTIAVASAFSGHQEVVQDRDHKFLTRAVEEAYKGVECGDGGPFGAVVVHKDEVVASCHNMVLKHTDPTAHAEVTAIREACKKLNKIELSDCEIYASCEPCPMCFGAIHLSRIKRLIYGAKAEAAIAIGFDDFIADALRGTGFYQKAHLEIKQADGNGAMIAEQVFEKTKAKFAIDHKFLTRAVEEAYKGVECGDGRPFGALVVHKDEVVVSCHNMVLNYTDPTAHAEITAIREACKKLNRIELSDCEMYSSCEPCPMCFGAIQISRIKRLVYGAKAEASIASGIPIGDFISDALKGTGFHEKANFEIKQADGNGAMIAEQVFERTKAMFPKR

SEQ ID NO: 383 - protein, 195 aa, Artificial Sequence
  Description of artificial sequence: pYY-BEM4.50; tr|W5M1M8|W5M1M8_LEPOC polypeptide sequence
NSSTRESRVMAQMEINGGASPPKKPGKGQSAADQDMITGLINKALQAKEFAYCPYSNFRVGAALMTNDGRVFTGCNVENACYNLGVCAERTAILKAVSEGYESFRAIAVSSDLQDQFISPCGACRQVMREFGTGWDVFLTKVDGSYVRMTVDELLPMSFGPDDLKKKKVFSLQNGHEVSTQFYTHSPCEAGENNN

SEQ ID NO: 384 - protein, 134 aa, Artificial Sequence
  Description of artificial sequence: pYY-BEM4.51; tr|A0A3N5YPZ2|A0A3N5YPZ2_9ALTE polypeptide sequence
MSNSETEHIQALVDAAQAAQKQSYSPYSSFQVGAAIFADDGNTYSGCNIENVAYPLGQCAEATAIGMMIMQGAKRIEDIMIASPNDQVCPPCGGCRQKISEFGTAETKIHMVTRSGEVSTVTLGELLPLAFDSL

SEQ ID NO: 385 - protein, 162 aa, Artificial Sequence
  Description of artificial sequence: pYY-BEM4.52; tr|A0A2A9NC86|A0A2A9NC86_9AGAR polypeptide sequence
MTNSTLSNEDRTRLIQGAFQARKKTYSPYSNFPVGAALLTTDGRIIEGANIENASYGGTICAERTAIVKAVSDGYRHFAGIAVTTKMPTRVSPCGICRQVLREFCSLDMPVLLVPGDYPQRNPVDDDGADKPGVITEGGVRETTLGALLPDSFGPENLPPRA

SEQ ID NO: 386 - protein, 163 aa, Artificial Sequence
  Description of artificial sequence: pYY-BEM4.53; tr|A0A2D6RD43|A0A2D6RD43_9GAMM polypeptide sequence
MNIENLITENDETLIRRCIELAGESVKNGDKPFGALLAKDGNIIFESSNNAKTKVPYHAEILTLMDAQDKLNTTDLSDYALYSNCEPCPMCSFMIREYKLDKVVFSVHSPYMGGQSRWNILEDDVLTRFKPYFSKPPNVVGGVLESEGKRIFDKVGLWMFGKE

SEQ ID NO: 387 - protein, 204 aa, Artificial Sequence
  Description of artificial sequence: pYY-BEM4.54; tr|A0A0H3AVL6|A0A0H3AVL6_BRUO2 polypeptide sequence
MHAKGYSQQERRIIPFANRFRFRELCSNKSLHGLRAKFPEQYTKWDPMRKAASITKANSATPMDIALEEAHAAGERGEVPIGAVIVRDGEIIARAGNRTREFNDVTAHAEILTIRQAGEMLGSERLIDCDLYVTLEPCAMCAAAISFARIRRLYYGASDPKGGGIEHGGRFYTQPTCHHAPEIYPGFCEADARKILKDFFREKR

SEQ ID NO: 388 - protein, 165 aa, Artificial Sequence
  Description of artificial sequence: pYY-BEM4.55; tr|A0A242H531|A0A242H531_9ENTE polypeptide sequence
MFIVKNNIEVIQQQAELDAKFMKQALKLAKDASNNGNEPFGAVLVKNDKVILTGENQIHTESDPTYHAELGIIRDFCTSQKITDLSEYTLYTSCEPCCMCAGAMVWSNLDRMVYGLGHDELAEIAGFNIMIGSEEIFSKSPNRPEVAKGVLKEAAVPVYVDYFQR

SEQ ID NO: 389 - protein, 181 aa, Artificial Sequence
  Description of artificial sequence: pYY-BEM4.56; tr|A0A2R6XZE2|A0A2R6XZE2_9BACL polypeptide sequence
MSGRISWHEYFMAQAKLIALRATCTRLMVGAVIVRDRRVIAGGYNGSIAGDEHCIDVGCKVRDGHCIRTIHAEQNALMQCAKFGVSTDGAELYVTHFPCLNCTKLLIQAGIRHIYYEVPYRVDPYAIELLEKAGVGTTQITVDLNAYVQVMSKVSTDPALTYVPESKAQKDEYGQSVGKIV

SEQ ID NO: 390 - protein, 173 aa, Artificial Sequence
  Description of artificial sequence: pYY-BEM4.57; tr|A0A139SHT6|A0A139SHT6_9BACT polypeptide sequence
MSEANASSESLPSRNSPVELIAEAAGKFGRRPTWDEYFMATAVLISTRSSCERLNVGCVIVTAGESHKNRIVAAGYNGHLPGSPHTSRMRDGHEQATVHAEQNAISDAARRGSSVEGCTAYVTHYPCINCAKILASAGIAKICYRLDYHNDPLVKPMLAEAGIEIVQLGEAAS

SEQ ID NO: 391 - protein, 170 aa, Artificial Sequence
  Description of artificial sequence: pYY-BEM4.58; tr|A0A261DBH2|A0A261DBH2_9RICK polypeptide sequence
MVMKKKLITVKRSTEFNNFFMEEALKQAQFALDKNEIPVGAIIVNRITNKVIAKAHNIVEQTKNPVLHAEIVAINQSCQILSSKNLSDCDMYVTLEPCVMCSGAISFARIGRLFYAANDPKQGAIENGGRFFNSKSCFYRPEIYSGFSAKISENLIKEFFYNVRYQKCNP

SEQ ID NO: 392 - protein, 146 aa, Artificial Sequence
  Description of artificial sequence: pYY-BEM4.59; tr|A0A2N0XZK6|A0A2N0XZK6_9VIBR polypeptide sequence
MTDNSLHESYMRQAFELSKSALPGCRPNPPVGCVFVKDGEVVSSGFSQPPGNHHAEAGAIAAYTGSYDGLVAYVTLEPCSFQGRTPSCAKALVRVRPEKVYVAILDPDTRNSGAGIKILEDAGIDVEVGLLGEEVASFLNPYLIRN

SEQ ID NO: 393 - protein, 159 aa, Artificial Sequence
  Description of artificial sequence: pYY-BEM4.60; tr|A0A1V5R0F9|A0A1V5R0F9_9BACT polypeptide sequence
MTKKETTKLHALDDFCMKKALLLAKRAFRADEVPVGALVVDSSNKVIGRGYNQVEKRKSQRAHAEQLAIEQACKKIGDWRLEGCTLYVTLEPCTMCMGLIKLSRIERVVFGAASPLFGYQLDKNRKSQLYKKGVIKIRKGVGKATAAALLKDFFKNKRM

SEQ ID NO: 394 - protein, 167 aa, Artificial Sequence
  Description of artificial sequence: pYY-BEM4.61; tr|A0A2W0H8Y3|A0A2W0H8Y3_9BACI polypeptide sequence
MKNNGRLDHEYFMTEALQEAKEAGQRGDLPIGAVIVHNGRIIARGSNMRKTAGIKISHAENNAMHNCAPYLMKHASECVIYTTLEPCIMCLTTLVMANIDSIVFAADDKYMNMKPFIDANSYIRDRIHQYKGGVCRGESEALLRKYSPYAAELALNGTHPHHRKGGA

SEQ ID NO: 395 - protein, 165 aa, Artificial Sequence
  Description of artificial sequence: pYY-BEM4.62; tr|A0A261BDB7|A0A261BDB7_CAERE polypeptide sequence
LYKLYIFRMTTTKANLTQFEQELVDKAVGAMEKAYCKYSGFKVGAALVCEDGEIIIGANHENASYGATICAERSAMVTALTKGHRKFKLLAVATELEAPCSPCGICRQYLIEFGDYKVILGSSTSDQIIETTTYGLLPYAFTPKSLDDHEKEAEERNHQEGEKKH

SEQ ID NO: 396 - protein, 162 aa, Artificial Sequence
  Description of artificial sequence: pYY-BEM4.63; tr|A0A2E1PHI6|A0A2E1PHI6_9GAMM polypeptide sequence
MKELLIHSWLMLNSNSKLIMERVIELSEINLKNGKIPIAAVIVDKKNYEIISESQNEDSPIGHAELLAITKALKKLNTNRLDSTNLFVTIEPCPMCAYAISKCHINRLYFGSEDEKGGGVINGPRIFESHNLKKIDYVSHCYHEKTTQLMQSFFQLKRNQQL

SEQ ID NO: 397 - protein, 133 aa, Artificial Sequence
  Description of artificial sequence: pYY-BEM4.64; tr|A0A378LUA7|A0A378LUA7_9GAMM polypeptide sequence
MDTIIKKMISNAHNTLAHSYSPYSKFSVASCICTDKDNFYTGVNVENSAYGLAICAETSAISAMVTAGEKRIKSMVVMAGTNILCSPCGACRQRIYEFSTPDTLIHLCDKNSILRTFKINELLPEAFKFDFNP

SEQ ID NO: 398 - protein, 370 aa, Artificial Sequence
  Description of artificial sequence: pYY-BEM4.65; tr|A0A139HQ78|A0A139HQ78_9PEZI polypeptide sequence
MADSLKSKPGHARHDTALIHGLSQSDVQKLSESCVDAKSKAYCPYSHFRVGCAVLLANGDVVQGANVENAAYPVGTCAERVALGTAVGAKKGDFRALAVSTDISPPASPCGMCRQFIREFCELNTPILMYDKDGKSVVMTLEQLLPMSFGPDKLLPPGQLENGLMQTQTQSSFVTRAFSTTSSRRQDDTPQVPQSHYDFFPQTFPQGPPPKTSFSPDLKQLRKEFLQLQAKAHPDLAPQDQKRRAEALSMRINEAYKTLQSPLRRAQYLLSQQGIDVEDETAKLDDSSLLMEVMEAREAVEEVEDEEQLNEIRAENNGRIEESVRVLEDAFRDNEFEKAAQEAIRLRYWVNIEESIQGWEKGNGGGILHH

SEQ ID NO: 399 - protein, 165 aa, Artificial Sequence
  Description of artificial sequence: pYY-BEM4.66; tr|A0A2A9FXV0|A0A2A9FXV0_9VIBR polypeptide sequence
MCNLKENKDMDKYFHFACDATIEGMREGTGGPFGATLTRNGEVVCSVANTVLKDMDISGHAEMVAVREACKKLDTLDLSDCVMYATCEPCPMCVSVMLWAGIKTCYYASTHLDAAKHGFSDQQLRDYLDGSDTSTLNMVHIEDNRDDCAKIWTEFRHLNETKNDG

SEQ ID NO: 400 - protein, 509 aa, Artificial Sequence
  Description of artificial sequence: pYY-BEM4.67; tr|A0A1A8AG96|A0A1A8AG96_NOTFU polypeptide sequence
MEHSDRWSRAEPGLSTSSRETRDGSTQTDCKLQGHGPRLSKVNLFTLLSLWMELFPQEQDEENGQSQIRRSGLVVVREGKVVGLHCSGADLHAGQAAILQHGASLANCQLFFSRRPCATCLKMIINAGVRQITFWPGDPEISMLTSNQTHSQRTSQSITEASLDATAVEKLKSNSRPQICVLMQPLAPGVLQFVDETSRRSDFMERMMDDDPELDSEKLFNSDRLRHLKDFCRHFLIQTDQRHKDILSQMGLKNFCVEPYFSNLRSNMTELVEVLAAVAAGMPQQHYGFYREESLSLDPHPVDVSQAVARHCIVQARLLSYRTEDPKVGVGAVIWAKGQSACCCGTGRLYLIGCGYNAYPAGSKYAEYPQMDNKQEDRERRKYRYIVHAEQNALTFRTRDIKPDECSMLFVTKCPCDECIPLIRGAGVKHIYTSDQDRDKDKGDISYLRFGSLKGVCKFIWQRSPPVSSASSLHLTNGCVGKHVRQAEQQIYKNKKLCTKGSSGSSDIC

SEQ ID NO: 401 - protein, 148 aa, Artificial Sequence
  Description of artificial sequence: pYY-BEM4.68; tr|A0A3E2VN88|A0A3E2VN88_9FIRM polypeptide sequence
MEKEITNMDKQKLIQMAVDGLGRSYAPYSHFHVSAALLCADGTVYTGNNIENAAYTPSVCAERCAIFKAVGDGRREFEAIAVCGGPDGVIEDYCPPCGVCRQVMREFCDPSSFRVLVAKTAEDYREYTLEQLLPDGFGPDHLTGSGER

SEQ ID NO: 402 - protein, 221 aa, Artificial Sequence
  Description of artificial sequence: pYY-BEM4.69; tr|A0A2D5ZRJ2|A0A2D5ZRJ2_9BACT polypeptide sequence
MARPVHLHTGERRTEEGATESRAVAAVATAITRAPRAPPRPATGRERDGPPPRRVFGGGLRVGDPSGYDRGESKPIGGPLTEKRSDWHSYFMRIAGEVATRATCDRKHVGAVIVRNRTILSTGYNGSIRGMPHCDDVGHDMVDGHCIATIHAEANAILQAARNGVMIQDGSIYITASPCWNCFKLVANAGLKRVYYGEFYRDKRSFEVARRLGIDLMHIEV

SEQ ID NO: 403 - protein, 155 aa, Artificial Sequence
  Description of artificial sequence: pYY-BEM4.70; tr|A0A1B8WPS3|A0A1B8WPS3_9BACI polypeptide sequence
MEGVQLIYQFQWGNLIMTVNKEDLYLIDVARNTIKTLYVDGKHHVGAAVRTKTGKIYSAVHLEANIGRVSVCAEAIALGKAISEGESEFDTIVAVRHPDPTQENQKIEVVSPCGICRELISDYGKGTNVILKNKEGYIKTVISDLLPNKYIREDN

SEQ ID NO: 404 - protein, 156 aa, Artificial Sequence
  Description of artificial sequence: pYY-BEM4.71; tr|A0A1W5ZQK9|A0A1W5ZQK9_9BACI polypeptide sequence
MNRFMERAVSLAAENVRVGGQPFGAVLVKDDELVAEGVNEMHLNYDVSGHAELLAIRRAQGELQTHDLSGYTMYASGEPCPMCLSAMYFAGIKDVFYCATVEEAAQVGLEKSKNVYDDLQKSKGERSLVMKQMPLEDDQEDPMKLWDERTNHNGTS

SEQ ID NO: 405 - protein, 340 aa, Artificial Sequence
  Description of artificial sequence: pYY-BEM4.72; tr|A0A378V0W4|A0A378V0W4_MYCFO polypeptide sequence
MVHAQFDPTARQALAATAVEAKTRKDLTWQQIADAAELSPAFVTAAVLGQHALPARSAEAVAALLGLDDDAALLLQTIPIRGSIPGGIPTDPTIYRFYEMLQVYGTTLKALVHEQFGDGIISAINFKLDVRKVADPEGGERAVITLDGKYLPPNPFDRVRYRGGLMDFAQRTIDIARQNVAEGGRPFATVIVKNGEILAESPNLVAQTHDPTAHAEILAIRKACTRIGTEHLIGATIYVLAQPCPMCLGSLYYCSPDEVVFLTTRDAYEPHYVDDRKYFELNMFYDEFAKPWDQRRLPMRYEPRDAAVDVYKLWQERNGGERRVPGAPTSTRPGKNPRGE

SEQ ID NO: 406 - protein, 157 aa, Artificial Sequence
  Description of artificial sequence: pYY-BEM4.73; tr|I3XF03|I3XF03_RHIFR polypeptide sequence
MKQRCMSPKSAQRFWDNDMHNNKDRPMSENELFVAAREAMAKAHAPYSKFPVGAAIRAEDGQIYTGANIENLSFPEGWCAETTAISHMVMAGQRKIMEVAVIAEKLALCPPCGGCRQRLAEFSGASTRIYLCDETGIKKSLALSDLLPHSFETEILG

SEQ ID NO: 407 - protein, 595 aa, Artificial Sequence
  Description of artificial sequence: pYY-BEM4.74; tr|F8IEF3|F8IEF3_ALIAT polypeptide sequence
MDAKELETRGWLCMRAVDVIDKKRRGEALAEEELRFLIEGYVAGRIPDYQMSAFLMAVVWRGMTREETLVLTRLLADSGERLDLSGIPGVKVDKHSTGGVGDKATLVVLPLVASIGVPVIKMSGRGLGHTGGTIDKLESIPGFRTDLSVAELVAQVRQVGIALGGQTADLAPADKKLYALRDVTGTVESLPLIASSVMSKKLAGGADAIVLDVKVGDGAFMKSRSDARRLARLMVEIGEAAGRRTVAVLSNMDQPLGCAIGNALEVAEAIRVLSGEGPFDLAEIALALAEEMTVLAGVAATREEARRMLRQSVAEGRALETLRRWIAAQGGDPAVVDDPSRLPQAPVQMPYLPKKAGFVAKLSALAFGLAAMRLGAGRETKEEAIDPSVGIVLHAKVGDRVQTHRPMFTVHARTGEDALRCIQELEAAIQISDDPVEAPPLILARIDRSEALPYADLMDAAREARDRAYVPYSGFAVGAALELADGRMVTGANVENASYGLTNCAERSAVFRAVAEGGPGTKPEIRAVAVIADSPEPVSPCGACRQVLAEFCSPDTPVYLGNLQGDVRETTVGALLPGAFTDAQMANVRRQDKEA

SEQ ID NO: 408 - protein, 153 aa, Artificial Sequence
  Description of artificial sequence: pYY-BEM4.75; tr|A0A1G3M638|A0A1G3M638_9SPIR polypeptide sequence
MKTTNINALDKWDLRFLQMAEHVAEWSKDPSTKVGAVIVRPDRTIASVGFNGFARGVRDTVERLWNRELKYPLTVHAELNAILSAHEPVRGHSLYVSPLSPCSNCAGVIIQSGIARVVAKCGQVNNPAQWSESFNLALTAFAEAGVSVILVEH

SEQ ID NO: 409 - protein, 177 aa, Artificial Sequence
  Description of artificial sequence: pYY-BEM4.76; tr|A0A3D9LFR2|A0A3D9LFR2_9MICC polypeptide sequence
MEQNDHGSSGAFSDPFEDDIPLTASLPRITGTGSGIDWQRLESTARAAMTRAYVPYSRFPVGAAALVEDGRVVAGCNIENASLGLTLCAECSLVSNLQMSGGGRIVAFYCVDGNGEVLMPCGRCRQLLYEFHAPGMRLMGPDGELTMDEVLPLAFGPADMTHLSDSAASTDDPGRTR

SEQ ID NO: 410 - protein, 172 aa, Artificial Sequence
  Description of artificial sequence: pYY-BEM4.77; tr|A0A3B9YGB5|A0A3B9YGB5_9BACT polypeptide sequence
MAKPISKKYRKLIETAKAARKKAYSPYSRYQVGAAVLTESGRIYSGANMENASYGLCMCAERVAIANAVTRGEKVLQAVCVVGKKARPCGACRQVMLEFSTKETELLMVDIDPNARRDTVIRTRVYSMLPNPFDPFESGMLPQHPQNLLRRRKSPQPRRKRRSRPVHREVSR

SEQ ID NO: 411 - protein, 391 aa, Artificial Sequence
  Description of artificial sequence: pYY-BEM4.78; tr|A0A182F569|A0A182F569_ANOAL polypeptide sequence
MPRPSQFRVSSSQSLSNSQIQASQSSDSVVDITSYVNAVVKALLNLSCTKTIIKRADLVNIALKGNGRLIGRVLQDANIELKEIYGYELIEVEKSKTMILCSTLAAGSMDELNDANRRRYTFLYLILGYIFMKNGSVPETIVWEFLETLGIEEQQEHNYFGDVRKLYDSLFKQAYLTRTKQALEGLNDDVMLISWGVRSKHEVSKKDILAGFCKVMNRDPVDFKAQYIEANEKDDKMNNNINGTVDGRNTVEYSSLDASVKELIEAAIKVRNNAYCPYSNFAVGAALRTVGGDIVTGCNVENGTFGPSVCAERTAVCKAVSEGHREFTAVAVVAFQETEFTAPCGTCRQTLSEFSRKDIPIYLVKPSPVRVMVTSLFQLLPHAFSPSFLNK

SEQ ID NO: 412 - protein, 151 aa, Artificial Sequence
  Description of artificial sequence: pYY-BEM4.79; tr|A0A264Z0D4|A0A264Z0D4_9BACI polypeptide sequence
MEPKKLIEEAIVASKQAYVQYSNFHVGAALLTKDGKLYHGCNIENASYGLTNCAERTAIFKAVSEGEKEFQAIAVVGDTEGPISPCGACRQVLAEFFSPDTVVILANLKGDHVVTNINELLPGFFSSKDLQKKVKNCFEKNALGSSCLRPI

SEQ ID NO: 413 - protein, 229 aa, Artificial Sequence
  Description of artificial sequence: pYY-BEM4.80; tr|A0A1L9Q1R3|A0A1L9Q1R3_ASPVE polypeptide sequence
MPLSAEEAALVETATATINSIPLSEDYSVASAAKASDGRVFTGVNVYHFTGGPCAELVVLGVAAAAGAAQLTHIVAVANEQRGILSPCGRCRQVLLDLQPNIQVIVGKEGSEQSVPVAQLLPFSYRQPDQHTPVIFKALTSSGPVVVDFFATWCGPCKAVAPVVGKLSETYTDVRFIQVDVDKARSISQEHDIRAMPTFVLYKDGKLLDKRVVGGNMKELEEQIKAIIA
